United States Patent Application Publication US 2023/0298691 A1 - sequence listing, part 3

SEQ ID NO: 82637 - DNA, 22 bp, Homo sapiens
caacatttaagttatttgataa

SEQ ID NO: 82638 - DNA, 16 bp, Homo sapiens
aatcagaactgagcat

SEQ ID NO: 82639 - DNA, 22 bp, Homo sapiens
gagagagatatggagaaacttt

SEQ ID NO: 82640 - DNA, 20 bp, Homo sapiens
caaaaatacttcctcgtgtt

SEQ ID NO: 82641 - DNA, 19 bp, Homo sapiens
gaatgttctcaacaagtga

SEQ ID NO: 82642 - DNA, 20 bp, Homo sapiens
aaaaaacctgcagtaaagaa

SEQ ID NO: 82643 - DNA, 20 bp, Homo sapiens
tcagttttaccaatttccat

SEQ ID NO: 82644 - DNA, 26 bp, Homo sapiens
cttcagaaaataatcactctattaaa

SEQ ID NO: 82645 - DNA, 19 bp, Homo sapiens
ctttggagtaagtagaaca

SEQ ID NO: 82646 - DNA, 17 bp, Homo sapiens
gttggtattaggaacca

SEQ ID NO: 82647 - DNA, 19 bp, Homo sapiens
catcttccataaaagcttt

SEQ ID NO: 82648 - DNA, 20 bp, Homo sapiens
aacaggcttcacctaaaaac

SEQ ID NO: 82649 - DNA, 19 bp, Homo sapiens
cgggacatgtaaaaagaga

SEQ ID NO: 82650 - DNA, 22 bp, Homo sapiens
tgttcctgtgaaaacaaatata

SEQ ID NO: 82651 - DNA, 17 bp, Homo sapiens
ggggctctcctcttctt

SEQ ID NO: 82652 - DNA, 16 bp, Homo sapiens
aacagaagcagtagaa

SEQ ID NO: 82653 - DNA, 23 bp, Homo sapiens
tttaaaaatagtgattggcaaca

SEQ ID NO: 82654 - DNA, 19 bp, Homo sapiens
taaactgccaagtcatgcc

SEQ ID NO: 82655 - DNA, 19 bp, Homo sapiens
ggctgaaaagacatagttt

SEQ ID NO: 82656 - DNA, 21 bp, Homo sapiens
ttgtcaaattcaagaattgga

SEQ ID NO: 82657 - DNA, 19 bp, Homo sapiens
actgaatctgtgtatctgt

SEQ ID NO: 82658 - DNA, 20 bp, Homo sapiens
agactgactttactctttca

SEQ ID NO: 82659 - DNA, 20 bp, Homo sapiens
ctattatcctgtcaaattca

SEQ ID NO: 82660 - DNA, 19 bp, Homo sapiens
aaagagtcaatactttagc

SEQ ID NO: 82661 - DNA, 25 bp, Homo sapiens
aaataaaaagctaattttaccatct

SEQ ID NO: 82662 - DNA, 24 bp, Homo sapiens
aaaactgatattatttgccttaaa

SEQ ID NO: 82663 - DNA, 22 bp, Homo sapiens
caaaagaaacttattaaatgaa

SEQ ID NO: 82664 - DNA, 16 bp, Homo sapiens
ggtccttgattaggca

SEQ ID NO: 82665 - DNA, 19 bp, Homo sapiens
caaaaagcactccagatgg

SEQ ID NO: 82666 - DNA, 20 bp, Homo sapiens
ttatcaatttgtgaatcaat

SEQ ID NO: 82667 - DNA, 20 bp, Homo sapiens
cggctctaaagaaacatgat

SEQ ID NO: 82668 - DNA, 20 bp, Homo sapiens
tcactgaaaattgtaaagcc

SEQ ID NO: 82669 - DNA, 28 bp, Homo sapiens
ttttctcatactgtattagaatttagaa

SEQ ID NO: 82670 - DNA, 20 bp, Homo sapiens
tggatattctcttagatttt

SEQ ID NO: 82671 - DNA, 20 bp, Homo sapiens
acttcttaacgttagtgtca

SEQ ID NO: 82672 - DNA, 19 bp, Homo sapiens
aaaagatcgaagattgttt

SEQ ID NO: 82673 - DNA, 22 bp, Homo sapiens
tgaacagcactataaaatacta

SEQ ID NO: 82674 - DNA, 22 bp, Homo sapiens
aaagtcaaaggctagccttgaa

SEQ ID NO: 82675 - DNA, 20 bp, Homo sapiens
gcggtaaaatttggattctg

SEQ ID NO: 82676 - DNA, 23 bp, Homo sapiens
aaaacagttaccagaatagtatc

SEQ ID NO: 82677 - DNA, 19 bp, Homo sapiens
tttccaaagtcagatgttc

SEQ ID NO: 82678 - DNA, 27 bp, Homo sapiens
ctaaatatttatatgtgtactagtcaa

SEQ ID NO: 82679 - DNA, 21 bp, Homo sapiens
tttttcatttcttgtagcaga

SEQ ID NO: 82680 - DNA, 18 bp, Homo sapiens
actaaggaacgtcaagag

SEQ ID NO: 82681 - DNA, 17 bp, Homo sapiens
ggtggaacaaagacttt

SEQ ID NO: 82682 - DNA, 19 bp, Homo sapiens
aatctcatttgtatgaaca

SEQ ID NO: 82683 - DNA, 19 bp, Homo sapiens
cctccaagttaatattcct

SEQ ID NO: 82684 - DNA, 21 bp, Homo sapiens
gtttcaggacatccattttat

SEQ ID NO: 82685 - DNA, 25 bp, Homo sapiens
cattgtcattaatcttatttttact

SEQ ID NO: 82686 - DNA, 16 bp, Homo sapiens
acaggcagaccaacca

SEQ ID NO: 82687 - DNA, 16 bp, Homo sapiens
agttacagctactgct

SEQ ID NO: 82688 - DNA, 18 bp, Homo sapiens
agagttgaacagtgtgtt

SEQ ID NO: 82689 - DNA, 19 bp, Homo sapiens
aaggcaaaaattcatcaca

SEQ ID NO: 82690 - DNA, 16 bp, Homo sapiens
tggctctgatgatagt

SEQ ID NO: 82691 - DNA, 17 bp, Homo sapiens
ccaccaccaaaggggga

SEQ ID NO: 82692 - DNA, 18 bp, Homo sapiens
aacaaaaacaactccaat

SEQ ID NO: 82693 - DNA, 24 bp, Homo sapiens
aatttaaacctaatctttggattt

SEQ ID NO: 82694 - DNA, 18 bp, Homo sapiens
ttctccattttggtcagg

SEQ ID NO: 82695 - DNA, 20 bp, Homo sapiens
tcttaattcgcatatcctgt

SEQ ID NO: 82696 - DNA, 22 bp, Homo sapiens
gatgtttttgcaagatacagac

SEQ ID NO: 82697 - DNA, 22 bp, Homo sapiens
gttgtgctttttaaatttcaat

SEQ ID NO: 82698 - DNA, 16 bp, Homo sapiens
gcagagggaacttggc

SEQ ID NO: 82699 - DNA, 18 bp, Homo sapiens
aagtcttcagaatgccag

SEQ ID NO: 82700 - DNA, 17 bp, Homo sapiens
cactctgtcataaaagc

SEQ ID NO: 82701 - DNA, 19 bp, Homo sapiens
gtctttccacagccaggca

SEQ ID NO: 82702 - DNA, 20 bp, Homo sapiens
ctgcactaatgtgttcattc

SEQ ID NO: 82703 - DNA, 16 bp, Homo sapiens
cagcagtaggaggcca

SEQ ID NO: 82704 - DNA, 16 bp, Homo sapiens
ggggccagaggctgcc

SEQ ID NO: 82705 - DNA, 26 bp, Homo sapiens
attacattaaaatttttagtttctag

SEQ ID NO: 82706 - DNA, 23 bp, Homo sapiens
tttgctgttaatttttatgcaat

SEQ ID NO: 82707 - DNA, 20 bp, Homo sapiens
agttaatgaaaatttttggt

SEQ ID NO: 82708 - DNA, 17 bp, Homo sapiens
aaactttccttaccaaa

SEQ ID NO: 82709 - DNA, 21 bp, Homo sapiens
acatgtttactttaaattgtt

SEQ ID NO: 82710 - DNA, 19 bp, Homo sapiens
gcctttccatcattggagg

SEQ ID NO: 82711 - DNA, 16 bp, Homo sapiens
tggcgtttctaaacat

SEQ ID NO: 82712 - DNA, 22 bp, Homo sapiens
ggaatacataaaagttaacaca

SEQ ID NO: 82713 - DNA, 23 bp, Homo sapiens
agtttcacactgaagattatttt

SEQ ID NO: 82714 - DNA, 20 bp, Homo sapiens
ctagccaactttttagttcg

SEQ ID NO: 82715 - DNA, 17 bp, Homo sapiens
tgatggtggatggctca

SEQ ID NO: 82716 - DNA, 20 bp, Homo sapiens
aaagacttctacagaatgct

SEQ ID NO: 82717 - DNA, 22 bp, Homo sapiens
tttataggtactctatgcaaaa

SEQ ID NO: 82718 - DNA, 19 bp, Homo sapiens
acagagccctgaacaaata

SEQ ID NO: 82719 - DNA, 24 bp, Homo sapiens
tgtcaaataattttctgaaattat

SEQ ID NO: 82720 - DNA, 25 bp, Homo sapiens
tctatagtgattataaacccaaatt

SEQ ID NO: 82721 - DNA, 20 bp, Homo sapiens
tgtagtttttgtacagagaa

SEQ ID NO: 82722 - DNA, 22 bp, Homo sapiens
attagcaaattccttaggaaag

SEQ ID NO: 82723 - DNA, 24 bp, Homo sapiens
gtggtttttatgataatattctac

SEQ ID NO: 82724 - DNA, 19 bp, Homo sapiens
ctttaaacttgcctgtatt

SEQ ID NO: 82725 - DNA, 22 bp, Homo sapiens
ggatccaaagcttatttctaga

SEQ ID NO: 82726 - DNA, 16 bp, Homo sapiens
tcacagactacacaga

SEQ ID NO: 82727 - DNA, 23 bp, Homo sapiens
gaaactggcagctatggaatgtg

SEQ ID NO: 82728 - DNA, 16 bp, Homo sapiens
agcagtgtgggatggc

SEQ ID NO: 82729 - DNA, 22 bp, Homo sapiens
gaaagggtgcttcttcaactaa

SEQ ID NO: 82730 - DNA, 24 bp, Homo sapiens
gtatcatatctaaaagtgaaaaca

SEQ ID NO: 82731 - DNA, 23 bp, Homo sapiens
tatgaaacaatatattcctagct

SEQ ID NO: 82732 - DNA, 17 bp, Homo sapiens
ctgtgtcatccctttcc

SEQ ID NO: 82733 - DNA, 21 bp, Homo sapiens
ttttattctcagttattcagt

SEQ ID NO: 82734 - DNA, 19 bp, Homo sapiens
gtttcagatatatttgcgc

SEQ ID NO: 82735 - DNA, 18 bp, Homo sapiens
atgcatttttgttttcac

SEQ ID NO: 82736 - DNA, 18 bp, Homo sapiens
aagttcaataatggccac

SEQ ID NO: 82737 - DNA, 20 bp, Homo sapiens
agatcggctataaaaaagat

SEQ ID NO: 82738 - DNA, 18 bp, Homo sapiens
tttaagacagctaagagg

SEQ ID NO: 82739 - DNA, 21 bp, Homo sapiens
ctgtgtttctgacataatttc

SEQ ID NO: 82740 - DNA, 16 bp, Homo sapiens
gcccaccagttctgct

SEQ ID NO: 82741 - DNA, 23 bp, Homo sapiens
ctagtagtgcagatacccaaaaa

SEQ ID NO: 82742 - DNA, 20 bp, Homo sapiens
agagtgcaaattaatttacc

SEQ ID NO: 82743 - DNA, 18 bp, Homo sapiens
ggcccagttagatcctcc

SEQ ID NO: 82744 - DNA, 23 bp, Homo sapiens
aatttaaatgtaaaacttctaga

SEQ ID NO: 82745 - DNA, 16 bp, Homo sapiens
ttcttcatggagcaga

SEQ ID NO: 82746 - DNA, 22 bp, Homo sapiens
agaatatgctttttatactaaa

SEQ ID NO: 82747 - DNA, 18 bp, Homo sapiens
cccagaatctcttatgtt

SEQ ID NO: 82748 - DNA, 22 bp, Homo sapiens
gtgaaaatattttcacttttat

SEQ ID NO: 82749 - DNA, 16 bp, Homo sapiens
tggtataccagcgagc

SEQ ID NO: 82750 - DNA, 22 bp, Homo sapiens
aagactttttaaagtgaatatt

SEQ ID NO: 82751 - DNA, 20 bp, Homo sapiens
tcactgaaaagcgatgataa

SEQ ID NO: 82752 - DNA, 23 bp, Homo sapiens
atctgtaatagaattgaatacat

SEQ ID NO: 82753 - DNA, 22 bp, Homo sapiens
atacatcatacctgtatagggt

SEQ ID NO: 82754 - DNA, 16 bp, Homo sapiens
cagtactcggcctgct

SEQ ID NO: 82755 - DNA, 20 bp, Homo sapiens
ctcaaacaaacaaacaaatt

SEQ ID NO: 82756 - DNA, 23 bp, Homo sapiens
accctagaccttttcctctgccc

SEQ ID NO: 82757 - DNA, 16 bp, Homo sapiens
ccaagatcacgccatt

SEQ ID NO: 82758 - DNA, 18 bp, Homo sapiens
cagctacttgagaggctg

SEQ ID NO: 82759 - DNA, 16 bp, Homo sapiens
tggtagagaaggggtt

SEQ ID NO: 82760 - DNA, 22 bp, Homo sapiens
gtataatccagatgatgtcttc

SEQ ID NO: 82761 - DNA, 21 bp, Homo sapiens
acctcaggtgatccactaatc

SEQ ID NO: 82762 - DNA, 17 bp, Homo sapiens
ttgggcctccacatatt

SEQ ID NO: 82763 - DNA, 20 bp, Homo sapiens
gcctggcctgatacaattaa

SEQ ID NO: 82764 - DNA, 21 bp, Homo sapiens
taattttaccttcatgttctt

SEQ ID NO: 82765 - DNA, 17 bp, Homo sapiens
attacagtggatggaga

SEQ ID NO: 82766 - DNA, 19 bp, Homo sapiens
aaagtctctaagactttgt

SEQ ID NO: 82767 - DNA, 18 bp, Homo sapiens
gaagaaaaggaagcagca

SEQ ID NO: 82768 - DNA, 22 bp, Homo sapiens
aaaataaagtcaatttactact

SEQ ID NO: 82769 - DNA, 20 bp, Homo sapiens
ttcactaaaattcaggagga

SEQ ID NO: 82770 - DNA, 18 bp, Homo sapiens
ctgtcccttgttgctatt

SEQ ID NO: 82771 - DNA, 20 bp, Homo sapiens
tttctaagaaaacaaaagga

SEQ ID NO: 82772 - DNA, 19 bp, Homo sapiens
accctgtctcaaaaaaaaa

SEQ ID NO: 82773 - DNA, 16 bp, Homo sapiens
agcacgaacttgctgt

SEQ ID NO: 82774 - DNA, 21 bp, Homo sapiens
tttaaatctcccttctttggg

SEQ ID NO: 82775 - DNA, 16 bp, Homo sapiens
aggtaagctgggtctg

SEQ ID NO: 82776 - DNA, 22 bp, Homo sapiens
gtttagtgaattaataatcctt

SEQ ID NO: 82777 - DNA, 18 bp, Homo sapiens
taaaacagcttctcacct

SEQ ID NO: 82778 - DNA, 24 bp, Homo sapiens
atttaccatcacgtgcactaacaa

SEQ ID NO: 82779 - DNA, 18 bp, Homo sapiens
cccttttgagaaatgcag

SEQ ID NO: 82780 - DNA, 21 bp, Homo sapiens
atgaagcagtgaagaatgcag

SEQ ID NO: 82781 - DNA, 17 bp, Homo sapiens
gaaaacataccaccaca

SEQ ID NO: 82782 - DNA, 17 bp, Homo sapiens
aatagtttgaggcacct

SEQ ID NO: 82783 - DNA, 20 bp, Homo sapiens
tgcctgtgattattcaaggc

SEQ ID NO: 82784 - DNA, 17 bp, Homo sapiens
cccttaagatgagctct

SEQ ID NO: 82785 - DNA, 18 bp, Homo sapiens
tggccttcctaatttcca

SEQ ID NO: 82786 - DNA, 22 bp, Homo sapiens
tggaacttttttgttctgattg

SEQ ID NO: 82787 - DNA, 16 bp, Homo sapiens
gcaacttccacacggt

SEQ ID NO: 82788 - DNA, 17 bp, Homo sapiens
tttcagtgaagagcagt

SEQ ID NO: 82789 - DNA, 22 bp, Homo sapiens
aaaaacaaagcatttacatact

SEQ ID NO: 82790 - DNA, 19 bp, Homo sapiens
aagctcagatccagttgga

SEQ ID NO: 82791 - DNA, 27 bp, Homo sapiens
atactttatctggatttataatcattt

SEQ ID NO: 82792 - DNA, 16 bp, Homo sapiens
atcaagggatgtcaca

SEQ ID NO: 82793 - DNA, 17 bp, Homo sapiens
ctttgtgggcattagta

SEQ ID NO: 82794 - DNA, 22 bp, Homo sapiens
aaaagaaaaagattcaggtaag

SEQ ID NO: 82795 - DNA, 17 bp, Homo sapiens
tctgatgatggacgcca

SEQ ID NO: 82796 - DNA, 19 bp, Homo sapiens
cagagaagcaaaatccact

SEQ ID NO: 82797 - DNA, 22 bp, Homo sapiens
tttgaagttgcaagatgataaa

SEQ ID NO: 82798 - DNA, 24 bp, Homo sapiens
ttttgaaacaaacatttaaatgat

SEQ ID NO: 82799 - DNA, 20 bp, Homo sapiens
ctgagttttttttgtcgctg

SEQ ID NO: 82800 - DNA, 22 bp, Homo sapiens
ttctccaaacagttatactgag

SEQ ID NO: 82801 - DNA, 17 bp, Homo sapiens
gcacttatcaaaactga

SEQ ID NO: 82802 - DNA, 20 bp, Homo sapiens
cagaaggaaagagatacaga

SEQ ID NO: 82803 - DNA, 18 bp, Homo sapiens
ttcatctgaaacctacag

SEQ ID NO: 82804 - DNA, 22 bp, Homo sapiens
tgaaagagctaacatacagtta

SEQ ID NO: 82805 - DNA, 20 bp, Homo sapiens
agtctggatctaaaaatttg

SEQ ID NO: 82806 - DNA, 21 bp, Homo sapiens
caaacctttcattgtaatttt

SEQ ID NO: 82807 - DNA, 18 bp, Homo sapiens
ttttcacaacagaaacga

SEQ ID NO: 82808 - DNA, 23 bp, Homo sapiens
atgttgaatttttgttttgtttt

SEQ ID NO: 82809 - DNA, 24 bp, Homo sapiens
aaaagacaatgttttttaaaagaa

SEQ ID NO: 82810 - DNA, 17 bp, Homo sapiens
cacgggagccccttcac

SEQ ID NO: 82811 - DNA, 19 bp, Homo sapiens
tcactagttagctagcaaa

SEQ ID NO: 82812 - DNA, 24 bp, Homo sapiens
tgttctgaggtggacctaatagga

SEQ ID NO: 82813 - DNA, 22 bp, Homo sapiens
gaattgagagaattgcttttca

SEQ ID NO: 82814 - DNA, 20 bp, Homo sapiens
cctagaatggaaaaaaaaga

SEQ ID NO: 82815 - DNA, 21 bp, Homo sapiens
ggtcattttggaaaacctgag

SEQ ID NO: 82816 - DNA, 22 bp, Homo sapiens
tttattgccagtaaattgtaac

SEQ ID NO: 82817 - DNA, 24 bp, Homo sapiens
attagcatataccaaaataaatag

SEQ ID NO: 82818 - DNA, 18 bp, Homo sapiens
tgcttgcagcaattaaca

SEQ ID NO: 82819 - DNA, 26 bp, Homo sapiens
tctaacacatctataataacattctt

SEQ ID NO: 82820 - DNA, 20 bp, Homo sapiens
acagaaaaatctccagcaaa

SEQ ID NO: 82821 - DNA, 22 bp, Homo sapiens
gtctatttgtcagacgaatgtt

SEQ ID NO: 82822 - DNA, 22 bp, Homo sapiens
gtatttttcattttgttgaatg

SEQ ID NO: 82823 - DNA, 23 bp, Homo sapiens
cattattaagcctcatatgttaa

SEQ ID NO: 82824 - DNA, 22 bp, Homo sapiens
tgtcaaaatagaaaaataccaa

SEQ ID NO: 82825 - DNA, 17 bp, Homo sapiens
atcaggccttcttactt

SEQ ID NO: 82826 - DNA, 20 bp, Homo sapiens
actttacctcacatactacc

SEQ ID NO: 82827 - DNA, 21 bp, Homo sapiens
gccactttcaagagacattca

SEQ ID NO: 82828 - DNA, 19 bp, Homo sapiens
gctgtcatttccccattcc

SEQ ID NO: 82829 - DNA, 19 bp, Homo sapiens
tttgtaattttgcatcggc

SEQ ID NO: 82830 - DNA, 21 bp, Homo sapiens
gcatgcagtatatgcataagc

SEQ ID NO: 82831 - DNA, 24 bp, Homo sapiens
cattcttttttggtccaaactttt

SEQ ID NO: 82832 - DNA, 16 bp, Homo sapiens
tgtacggccctgaagt

SEQ ID NO: 82833 - DNA, 20 bp, Homo sapiens
atgtgggtttgcaatttata

SEQ ID NO: 82834 - DNA, 24 bp, Homo sapiens
atattccttgagtttacattaact

SEQ ID NO: 82835 - DNA, 22 bp, Homo sapiens
ctttgcaatgaagcagaaaaca

SEQ ID NO: 82836 - DNA, 20 bp, Homo sapiens
ttttaccatgtttactaggt

SEQ ID NO: 82837 - DNA, 18 bp, Homo sapiens
accccaactaaagactgt

SEQ ID NO: 82838 - DNA, 17 bp, Homo sapiens
ctatacttacaggagcc

SEQ ID NO: 82839 - DNA, 22 bp, Homo sapiens
agcttctggtaagttaatgtaa

SEQ ID NO: 82840 - DNA, 24 bp, Homo sapiens
ctagaataggaataatgtgaactg

SEQ ID NO: 82841 - DNA, 21 bp, Homo sapiens
gccatacaaagtgataaagga

SEQ ID NO: 82842 - DNA, 21 bp, Homo sapiens
agactgtgtgtaatatttgcg

SEQ ID NO: 82843 - DNA, 19 bp, Homo sapiens
acaagactttgaagtcatc

SEQ ID NO: 82844 - DNA, 23 bp, Homo sapiens
gttactacataattatgataggc

SEQ ID NO: 82845 - DNA, 16 bp, Homo sapiens
caaggctcttctcttt

SEQ ID NO: 82846 - DNA, 22 bp, Homo sapiens
ctcctaattgtgagatatatta

SEQ ID NO: 82847 - DNA, 17 bp, Homo sapiens
gccggagaaacaaatgt

SEQ ID NO: 82848 - DNA, 23 bp, Homo sapiens
ctgtttccacacctgtctcagcc

SEQ ID NO: 82849 - DNA, 19 bp, Homo sapiens
tctttatgggtgtttcgta

SEQ ID NO: 82850 - DNA, 19 bp, Homo sapiens
atgaccaaaagaactgcaa

SEQ ID NO: 82851 - DNA, 24 bp, Homo sapiens
ccaaaagagaaatttcattgaatt

SEQ ID NO: 82852 - DNA, 17 bp, Homo sapiens
ctgttagtcccatttgt

SEQ ID NO: 82853 - DNA, 19 bp, Homo sapiens
aagagcttgggtatttatc

SEQ ID NO: 82854 - DNA, 16 bp, Homo sapiens
aggagttgtggcacca

SEQ ID NO: 82855 - DNA, 16 bp, Homo sapiens
gagcagtcctagtgga

SEQ ID NO: 82856 - DNA, 22 bp, Homo sapiens
ctcagatgactccatttaaaaa

SEQ ID NO: 82857 - DNA, 18 bp, Homo sapiens
tttgatcagagatgtagt

SEQ ID NO: 82858 - DNA, 24 bp, Homo sapiens
tagctgacgaagaacttgcattga

SEQ ID NO: 82859 - DNA, 16 bp, Homo sapiens
tgtgtcctgcttattt

SEQ ID NO: 82860 - DNA, 22 bp, Homo sapiens
ttatatctgtcagtgaatccac

SEQ ID NO: 82861 - DNA, 19 bp, Homo sapiens
ggttaagcgtcaataattt

SEQ ID NO: 82862 - DNA, 16 bp, Homo sapiens
actgaaacgacgttgt

SEQ ID NO: 82863 - DNA, 19 bp, Homo sapiens
ctcattgtgcaacataagt

SEQ ID NO: 82864 - DNA, 20 bp, Homo sapiens
cggaagaatgtgagaaaaat

SEQ ID NO: 82865 - DNA, 18 bp, Homo sapiens
cgggcaaaacgatttttg

SEQ ID NO: 82866 - DNA, 22 bp, Homo sapiens
gacgcggcgctcagttgccggg

SEQ ID NO: 82867 - DNA, 19 bp, Homo sapiens
gcggcagcggcggcggtgg

SEQ ID NO: 82868 - DNA, 24 bp, Homo sapiens
tgaaattatttttgtaacgggagt

SEQ ID NO: 82869 - DNA, 17 bp, Homo sapiens
ctgctctgggtcctcct

SEQ ID NO: 82870 - DNA, 23 bp, Homo sapiens
tcctccccggcgctcctccacag

SEQ ID NO: 82871 - DNA, 23 bp, Homo sapiens
gcccttcccgcgtgaggcgacgg

SEQ ID NO: 82872 - DNA, 24 bp, Homo sapiens
aaaaccccccgaaaaacggccgcc

SEQ ID NO: 82873 - DNA, 18 bp, Homo sapiens
cggatccccgccgagccg

SEQ ID NO: 82874 - DNA, 23 bp, Homo sapiens
gccgccgccccctcctgaggagg

SEQ ID NO: 82875 - DNA, 23 bp, Homo sapiens
cagacgctccgccgtggcggggg

SEQ ID NO: 82876 - DNA, 26 bp, Homo sapiens
gataatcatatgtttaaatttgaagt

SEQ ID NO: 82877 - DNA, 18 bp, Homo sapiens
aatgcagtaaaatcaggt

SEQ ID NO: 82878 - DNA, 22 bp, Homo sapiens
taataatgttctttttcacagt

SEQ ID NO: 82879 - DNA, 18 bp, Homo sapiens
tcccaagttaaccaagct

SEQ ID NO: 82880 - DNA, 23 bp, Homo sapiens
gtactgaatcaatttgatttata

SEQ ID NO: 82881 - DNA, 23 bp, Homo sapiens
aaaaaaatttcaaaacgttttaa

SEQ ID NO: 82882 - DNA, 20 bp, Homo sapiens
ttgagtttgaagaaacagaa

SEQ ID NO: 82883 - DNA, 23 bp, Homo sapiens
tctttatatttttctatctttca

SEQ ID NO: 82884 - DNA, 17 bp, Homo sapiens
tgtcagagagagagctt

SEQ ID NO: 82885 - DNA, 19 bp, Homo sapiens
ttttaatgttagcagaggt

SEQ ID NO: 82886 - DNA, 18 bp, Homo sapiens
atatgccatcagaaggat

SEQ ID NO: 82887 - DNA, 18 bp, Homo sapiens
actgctgcaataaagata

SEQ ID NO: 82888 - DNA, 21 bp, Homo sapiens
tttgtatgctgaataagaaaa

SEQ ID NO: 82889 - DNA, 19 bp, Homo sapiens
ctttacctgatttctatgt

SEQ ID NO: 82890 - DNA, 24 bp, Homo sapiens
atttaatgaaatatttgatcttta

SEQ ID NO: 82891 - DNA, 20 bp, Homo sapiens
gagaggaaaatccagaattc

SEQ ID NO: 82892 - DNA, 17 bp, Homo sapiens
aggaactgtggggaatc

SEQ ID NO: 82893 - DNA, 20 bp, Homo sapiens
ggtccaagttctttttgttt

SEQ ID NO: 82894 - DNA, 22 bp, Homo sapiens
tcgttcacttttactgagctac

SEQ ID NO: 82895 - DNA, 20 bp, Homo sapiens
actggtatcaatttctttta

SEQ ID NO: 82896 - DNA, 18 bp, Homo sapiens
agtgatttgatgtagagc

SEQ ID NO: 82897 - DNA, 22 bp, Homo sapiens
gagtgcaaacaatacatcatac

SEQ ID NO: 82898 - DNA, 20 bp, Homo sapiens
aaaacgaaataacacaaatt

SEQ ID NO: 82899 - DNA, 24 bp, Homo sapiens
atgacataaaaaatcagagtgtaa

SEQ ID NO: 82900 - DNA, 25 bp, Homo sapiens
gtagtgtccataaattctttaactt

SEQ ID NO: 82901 - DNA, 25 bp, Homo sapiens
taatacttactaactttactaaatg

SEQ ID NO: 82902 - DNA, 19 bp, Homo sapiens
tgtcaagactgttgaagaa

SEQ ID NO: 82903 - DNA, 24 bp, Homo sapiens
aaataagaaagctaagaattaatg

SEQ ID NO: 82904 - DNA, 21 bp, Homo sapiens
tgggaaaatctacttgaactt

SEQ ID NO: 82905 - DNA, 23 bp, Homo sapiens
aataacattctgtgaactactta

SEQ ID NO: 82906 - DNA, 25 bp, Homo sapiens
tatatacttcttaaaagaagataaa

SEQ ID NO: 82907 - DNA, 22 bp, Homo sapiens
taaccctaactatcaagatgtt

SEQ ID NO: 82908 - DNA, 22 bp, Homo sapiens
gttaaaaagtcataatgttttt

SEQ ID NO: 82909 - DNA, 18 bp, Homo sapiens
acacaggacttaaatcta

SEQ ID NO: 82910 - DNA, 20 bp, Homo sapiens
cacaacccagcagttcgtaa

SEQ ID NO: 82911 - DNA, 18 bp, Homo sapiens
ttttagcaccaatgcaga

SEQ ID NO: 82912 - DNA, 24 bp, Homo sapiens
catttaactaaggtcatttttttt

SEQ ID NO: 82913 - DNA, 23 bp, Homo sapiens
tattagcatttaataaatataat

SEQ ID NO: 82914 - DNA, 24 bp, Homo sapiens
actttctttcagtgatacattttt

SEQ ID NO: 82915 - DNA, 22 bp, Homo sapiens
aataaaaattggggaatttagt

SEQ ID NO: 82916 - DNA, 22 bp, Homo sapiens
ggatatctactgaaataaattc

SEQ ID NO: 82917 - DNA, 19 bp, Homo sapiens
tataggaacttgctaacag

SEQ ID NO: 82918 - DNA, 25 bp, Homo sapiens
cagattttttttttttttacaaaaa

SEQ ID NO: 82919 - DNA, 19 bp, Homo sapiens
ggacacatagcattaactg

SEQ ID NO: 82920 - DNA, 22 bp, Homo sapiens
aatgaataaatttatggatata

SEQ ID NO: 82921 - DNA, 22 bp, Homo sapiens
ttactatatggttctttgagca

SEQ ID NO: 82922 - DNA, 20 bp, Homo sapiens
tctgaatctctaactttctt

SEQ ID NO: 82923 - DNA, 20 bp, Homo sapiens
tggtacccactagacattca

SEQ ID NO: 82924 - DNA, 22 bp, Homo sapiens
tggaagatgatctggtgatttc

SEQ ID NO: 82925 - DNA, 20 bp, Homo sapiens
ggcaaagtccatgtctgatt

SEQ ID NO: 82926 - DNA, 17 bp, Homo sapiens
tcccatgttgctcaaag

SEQ ID NO: 82927 - DNA, 16 bp, Homo sapiens
tgttcgaggtgaacca

SEQ ID NO: 82928 - DNA, 23 bp, Homo sapiens
aataagtaaaagtagtagaatgt

SEQ ID NO: 82929 - DNA, 24 bp, Homo sapiens
tcttgtatcattttctagttgttt

SEQ ID NO: 82930 - DNA, 26 bp, Homo sapiens
tacttcattattttatatgatggatg

SEQ ID NO: 82931 - DNA, 24 bp, Homo sapiens
aaatcatgaagttaaattacctca

SEQ ID NO: 82932 - DNA, 17 bp, Homo sapiens
acagctgttatacccat

SEQ ID NO: 82933 - DNA, 21 bp, Homo sapiens
aagtaaatattgttagggaga

SEQ ID NO: 82934 - DNA, 18 bp, Homo sapiens
agtgcacggatagcaaaa

SEQ ID NO: 82935 - DNA, 22 bp, Homo sapiens
aaatattttgctactgcaaaag

SEQ ID NO: 82936 - DNA, 25 bp, Homo sapiens
taaagaacatgaatgtaatatagat

SEQ ID NO: 82937 - DNA, 23 bp, Homo sapiens
ataaaaggtataaaatttttgaa

SEQ ID NO: 82938 - DNA, 17 bp, Homo sapiens
ttttttactgcatgggg

SEQ ID NO: 82939 - DNA, 20 bp, Homo sapiens
aaatttcctttcagattacc

SEQ ID NO: 82940 - DNA, 21 bp, Homo sapiens
gtcaagagattagattttgtt

SEQ ID NO: 82941 - DNA, 21 bp, Homo sapiens
aattgatctaagaaagttaga

SEQ ID NO: 82942 - DNA, 20 bp, Homo sapiens
ggtgaaaaatgtttatttca

SEQ ID NO: 82943 - DNA, 18 bp, Homo sapiens
accacaattctacttggc

SEQ ID NO: 82944 - DNA, 16 bp, Homo sapiens
tggacttccagaggta

SEQ ID NO: 82945 - DNA, 19 bp, Homo sapiens
ctgtacctcacttttagat

SEQ ID NO: 82946 - DNA, 28 bp, Homo sapiens
gcatctagatctttatttttaagataaa

SEQ ID NO: 82947 - DNA, 25 bp, Homo sapiens
attaaatgtatattatacaaaaatt

SEQ ID NO: 82948 - DNA, 24 bp, Homo sapiens
gtgcaatacctgtctatagaatca

SEQ ID NO: 82949 - DNA, 19 bp, Homo sapiens
atgtaatgacatgtaaagg

SEQ ID NO: 82950 - DNA, 22 bp, Homo sapiens
cctatatcagtatcaacctata

SEQ ID NO: 82951 - DNA, 21 bp, Homo sapiens
ctttctaaacgatacgaagaa

SEQ ID NO: 82952 - DNA, 21 bp, Homo sapiens
agacatttgaaagtaatttgt

SEQ ID NO: 82953 - DNA, 20 bp, Homo sapiens
tggatcatgataaaactctt

SEQ ID NO: 82954 - DNA, 21 bp, Homo sapiens
attttatttaagcagcagctg

SEQ ID NO: 82955 - DNA, 18 bp, Homo sapiens
acattcacctcttcatca

SEQ ID NO: 82956 - DNA, 25 bp, Homo sapiens
cattttatatgattttatgagacaa

SEQ ID NO: 82957 - DNA, 29 bp, Homo sapiens
ataacaaaattataatataattaaaagta

SEQ ID NO: 82958 - DNA, 21 bp, Homo sapiens
aattgtaaattttcagtatgt

SEQ ID NO: 82959 - DNA, 23 bp, Homo sapiens
gtatgaatacataaagaaacgtg

SEQ ID NO: 82960 - DNA, 20 bp, Homo sapiens
caccacgaaaaagtaacctt

SEQ ID NO: 82961 - DNA, 18 bp, Homo sapiens
tcttataaaccacagtct

SEQ ID NO: 82962 - DNA, 17 bp, Homo sapiens
gaaggttgatcacttgc

SEQ ID NO: 82963 - DNA, 20 bp, Homo sapiens
agatacatttaacttgggag

SEQ ID NO: 82964 - DNA, 26 bp, Homo sapiens
tttgccaagatattacaataaataat

SEQ ID NO: 82965 - DNA, 18 bp, Homo sapiens
tgcttaacacattttcct

SEQ ID NO: 82966 - DNA, 25 bp, Homo sapiens
agataggagattagtattttaaaaa

SEQ ID NO: 82967 - DNA, 24 bp, Homo sapiens
attaatgatgattttaaattcagc

SEQ ID NO: 82968 - DNA, 22 bp, Homo sapiens
aatatataatttgtaagattaa

SEQ ID NO: 82969 - DNA, 21 bp, Homo sapiens
tccagtgaaatgatattgtct

SEQ ID NO: 82970 - DNA, 19 bp, Homo sapiens
tccttcactcttttcagta

SEQ ID NO: 82971 - DNA, 19 bp, Homo sapiens
ccacatttttatgaacaat

SEQ ID NO: 82972 - DNA, 16 bp, Homo sapiens
ttcgacacaaccctgt

SEQ ID NO: 82973 - DNA, 16 bp, Homo sapiens
ttacacagtatcctcg

SEQ ID NO: 82974 - DNA, 21 bp, Homo sapiens
tgctgcttttaatattattac

SEQ ID NO: 82975 - DNA, 19 bp, Homo sapiens
agtgaatccaaaagaaagt

SEQ ID NO: 82976 - DNA, 24 bp, Homo sapiens
gtattttatactactagacaaata

SEQ ID NO: 82977 - DNA, 22 bp, Homo sapiens
agagaaatttgctaaagctgtg

SEQ ID NO: 82978 - DNA, 19 bp, Homo sapiens
ttccataaagttacccata

SEQ ID NO: 82979 - DNA, 19 bp, Homo sapiens
tataatcccagcctcttgg

SEQ ID NO: 82980 - DNA, 17 bp, Homo sapiens
ggattccattactcggt

SEQ ID NO: 82981 - DNA, 16 bp, Homo sapiens
gaaggccagcctgggc

SEQ ID NO: 82982 - DNA, 16 bp, Homo sapiens
tgccttgacctcctga

SEQ ID NO: 82983 - DNA, 21 bp, Homo sapiens
acaaacttggagttcgcttgt

SEQ ID NO: 82984 - DNA, 17 bp, Homo sapiens
gtgagccaagattgtgc

SEQ ID NO: 82985 - DNA, 24 bp, Homo sapiens
tctataaaaagaaaaaaatttttt

SEQ ID NO: 82986 - DNA, 20 bp, Homo sapiens
cattcagaagtttgctaaag

SEQ ID NO: 82987 - DNA, 24 bp, Homo sapiens
aacttctttttttttttttaaatt

SEQ ID NO: 82988 - DNA, 16 bp, Homo sapiens
tgtggccattacaacc

SEQ ID NO: 82989 - DNA, 24 bp, Homo sapiens
tttaggtaaattttttacttttag

SEQ ID NO: 82990 - DNA, 17 bp, Homo sapiens
acacaccacattttaac

SEQ ID NO: 82991 - DNA, 21 bp, Homo sapiens
atctttttttttttcctttag

SEQ ID NO: 82992 - DNA, 21 bp, Homo sapiens
aaaataagcattccttctcct

SEQ ID NO: 82993 - DNA, 19 bp, Homo sapiens
attggcgtgcgctcttgag

SEQ ID NO: 82994 - DNA, 21 bp, Homo sapiens
caaataagcctcttaaatggc

SEQ ID NO: 82995 - DNA, 16 bp, Homo sapiens
tggaaggctatttcct

SEQ ID NO: 82996 - DNA, 21 bp, Homo sapiens
aagacaaatctgttccagaat

SEQ ID NO: 82997 - DNA, 23 bp, Homo sapiens
aaaatggtttaacctttctactg

SEQ ID NO: 82998 - DNA, 17 bp, Homo sapiens
actttcgatcactttgt

SEQ ID NO: 82999 - DNA, 22 bp, Homo sapiens
aaatacctagctcaagggttaa

SEQ ID NO: 83000 - DNA, 18 bp, Homo sapiens
tgttcacatcgttctaaa

SEQ ID NO: 83001 - DNA, 22 bp, Homo sapiens
aagtacatctcagaatcttgat

SEQ ID NO: 83002 - DNA, 22 bp, Homo sapiens
tgaatttcttcaattatttagc

SEQ ID NO: 83003 - DNA, 22 bp, Homo sapiens
aaaagcctttgatttttacaaa

SEQ ID NO: 83004 - DNA, 20 bp, Homo sapiens
tgaggtagatgttaagaaac

SEQ ID NO: 83005 - DNA, 24 bp, Homo sapiens
ttgacaagagaaatgataaaacat

SEQ ID NO: 83006 - DNA, 19 bp, Homo sapiens
tgatccttgggctatagac

SEQ ID NO: 83007 - DNA, 19 bp, Homo sapiens
caattgggaatttcgaagt

SEQ ID NO: 83008 - DNA, 18 bp, Homo sapiens
ctcggtcctttgattgtt

SEQ ID NO: 83009 - DNA, 21 bp, Homo sapiens
ccactgtcaattgtgcctaaa

SEQ ID NO: 83010 - DNA, 16 bp, Homo sapiens
ttctggagaggaagat

SEQ ID NO: 83011 - DNA, 17 bp, Homo sapiens
acctgggaaaattatgc

SEQ ID NO: 83012 - DNA, 17 bp, Homo sapiens
ttgcagtttgaatggtc

SEQ ID NO: 83013 - DNA, 22 bp, Homo sapiens
tcacctttatttgatcttatta

SEQ ID NO: 83014 - DNA, 21 bp, Homo sapiens
tcaaaattctattccctacag

SEQ ID NO: 83015 - DNA, 17 bp, Homo sapiens
atctgcttgtcctctta

SEQ ID NO: 83016 - DNA, 24 bp, Homo sapiens
tttatatgactttatttgggtcat

SEQ ID NO: 83017 - DNA, 19 bp, Homo sapiens
atgacaagcagttttccta

SEQ ID NO: 83018 - DNA, 19 bp, Homo sapiens
gcgtagttgaacctttttt

SEQ ID NO: 83019 - DNA, 23 bp, Homo sapiens
caattaaatagacaagatgtatc

SEQ ID NO: 83020 - DNA, 16 bp, Homo sapiens
tctgggtctggaaggc

SEQ ID NO: 83021 - DNA, 21 bp, Homo sapiens
tctgtgattcttagccaactt

SEQ ID NO: 83022 - DNA, 23 bp, Homo sapiens
tgctcttgaaaataatcatctac

SEQ ID NO: 83023 - DNA, 20 bp, Homo sapiens
tcctgtaagatctccaaaga

SEQ ID NO: 83024 - DNA, 19 bp, Homo sapiens
tgtacctagaaagtagaag

SEQ ID NO: 83025 - DNA, 19 bp, Homo sapiens
agagacacaagcaacctca

SEQ ID NO: 83026 - DNA, 24 bp, Homo sapiens
tttccattttatagatgaggaaac

SEQ ID NO: 83027 - DNA, 20 bp, Homo sapiens
cactgttttataaaaaaggt

SEQ ID NO: 83028 - DNA, 19 bp, Homo sapiens
aaccagtaaacatgtttct

SEQ ID NO: 83029 - DNA, 19 bp, Homo sapiens
gcgttcacaaagtgtattt

SEQ ID NO: 83030 - DNA, 22 bp, Homo sapiens
tttctgttaaaatgctacttaa

SEQ ID NO: 83031 - DNA, 17 bp, Homo sapiens
gcagggtgtgctggaaa

SEQ ID NO: 83032 - DNA, 20 bp, Homo sapiens
acttgtaattcaaaatgaac

SEQ ID NO: 83033 - DNA, 17 bp, Homo sapiens
gtgaagtgcttgatttt

SEQ ID NO: 83034 - DNA, 19 bp, Homo sapiens
gctagcctatctccggcta

SEQ ID NO: 83035 - DNA, 20 bp, Homo sapiens
gagagaaagaaagaaagaaa

SEQ ID NO: 83036 - DNA, 17 bp, Homo sapiens
aggcatttggaccaagt

SEQ ID NO: 83037 - DNA, 19 bp, Homo sapiens
cacactttgggttaaacac

SEQ ID NO: 83038 - DNA, 19 bp, Homo sapiens
cttcactttgcatatgcca

SEQ ID NO: 83039 - DNA, 23 bp, Homo sapiens
taactctgtagattaaacctttc

SEQ ID NO: 83040 - DNA, 18 bp, Homo sapiens
cctgaacagcatgaggaa

SEQ ID NO: 83041 - DNA, 22 bp, Homo sapiens
tttaagaacaaaaccatgtaat

SEQ ID NO: 83042 - DNA, 25 bp, Homo sapiens
atgttatgttatggatatggattta

SEQ ID NO: 83043 - DNA, 17 bp, Homo sapiens
tgtgttccatgtatggc

SEQ ID NO: 83044 - DNA, 19 bp, Homo sapiens
aggtcagacagaatatatg

SEQ ID NO: 83045 - DNA, 22 bp, Homo sapiens
aatcattgtaacagcatacaag

SEQ ID NO: 83046 - DNA, 22 bp, Homo sapiens
ttccaattctatttaagttaca

SEQ ID NO: 83047 - DNA, 22 bp, Homo sapiens
tataatagaatcatactcctct

SEQ ID NO: 83048 - DNA, 24 bp, Homo sapiens
aaaagtattataaactattagaaa

SEQ ID NO: 83049 - DNA, 24 bp, Homo sapiens
catactgcaaaatatttgttttca

SEQ ID NO: 83050 - DNA, 26 bp, Homo sapiens
tcatttaacaagtaaattttactttt

SEQ ID NO: 83051 - DNA, 19 bp, Homo sapiens
tggtggacccattacatta

SEQ ID NO: 83052 - DNA, 17 bp, Homo sapiens
aaacgtgttttgatcaa

SEQ ID NO: 83053 - DNA, 16 bp, Homo sapiens
aggtagggggctagag

SEQ ID NO: 83054 - DNA, 19 bp, Homo sapiens
gtcttcatgcagagactga

SEQ ID NO: 83055 - DNA, 16 bp, Homo sapiens
tccgtaagggtgaact

SEQ ID NO: 83056 - DNA, 18 bp, Homo sapiens
tcctttgattggaaaaat

SEQ ID NO: 83057 - DNA, 19 bp, Homo sapiens
gcagaccttctgaaatttt

SEQ ID NO: 83058 - DNA, 18 bp, Homo sapiens
tttttgtttttgctctag

SEQ ID NO: 83059 - DNA, 18 bp, Homo sapiens
actacttccctaaagaga

SEQ ID NO: 83060 - DNA, 18 bp, Homo sapiens
agcccttacaagtttcct

SEQ ID NO: 83061 - DNA, 21 bp, Homo sapiens
tttgaaatgaagaatgcttta

SEQ ID NO: 83062 - DNA, 19 bp, Homo sapiens
acccctgaagagtccatat

SEQ ID NO: 83063 - DNA, 24 bp, Homo sapiens
cccccatattcttattatgttact

SEQ ID NO: 83064 - DNA, 21 bp, Homo sapiens
aattcccaaatgaatatagtt

SEQ ID NO: 83065 - DNA, 25 bp, Homo sapiens
catactattatatttcatagaaaga

SEQ ID NO: 83066 - DNA, 22 bp, Homo sapiens
tttggtattcctaatagttcag

SEQ ID NO: 83067 - DNA, 20 bp, Homo sapiens
taactgcatttggaaattca

SEQ ID NO: 83068 - DNA, 24 bp, Homo sapiens
tatggttttttattactaattggt

SEQ ID NO: 83069 - DNA, 23 bp, Homo sapiens
aatctgagatatatatatctcat

SEQ ID NO: 83070 - DNA, 22 bp, Homo sapiens
atttttcatatcttttatttgg

SEQ ID NO: 83071 - DNA, 16 bp, Homo sapiens
gcacacggtcgctgtt

SEQ ID NO: 83072 - DNA, 23 bp, Homo sapiens
tacctttgcctgatttttgacac

SEQ ID NO: 83073 - DNA, 18 bp, Homo sapiens
ccttcaatatcaaagcgt

SEQ ID NO: 83074 - DNA, 21 bp, Homo sapiens
tggcatttaatgatttaaagt

SEQ ID NO: 83075 - DNA, 19 bp, Homo sapiens
gctactggaaaacattcaa

SEQ ID NO: 83076 - DNA, 19 bp, Homo sapiens
aatcagatggtatgtaaca

SEQ ID NO: 83077 - DNA, 18 bp, Homo sapiens
ggcatgaaagaaattggt

SEQ ID NO: 83078 - DNA, 18 bp, Homo sapiens
cctcctaaaccactgaaa

SEQ ID NO: 83079 - DNA, 16 bp, Homo sapiens
ttgcactacactcata

SEQ ID NO: 83080 - DNA, 20 bp, Homo sapiens
atgttttagatggttagttt

SEQ ID NO: 83081 - DNA, 19 bp, Homo sapiens
aaggtgaaaaaagtactta

SEQ ID NO: 83082 - DNA, 16 bp, Homo sapiens
agtcatcgaaagcatc

SEQ ID NO: 83083 - DNA, 22 bp, Homo sapiens
ttatataacgaaaagacttctt

SEQ ID NO: 83084 - DNA, 21 bp, Homo sapiens
tacacatgaaatgttttgcat

SEQ ID NO: 83085 - DNA, 28 bp, Homo sapiens
ataaataaccttgattgaattatatttt

SEQ ID NO: 83086 - DNA, 20 bp, Homo sapiens
tttcagcagaaactggcaga

SEQ ID NO: 83087 - DNA, 19 bp, Homo sapiens
ttcattttctgcttttgca

SEQ ID NO: 83088 - DNA, 21 bp, Homo sapiens
aagaccactgcttttgcaagg

SEQ ID NO: 83089 - DNA, 16 bp, Homo sapiens
accaaggtcctgagat

SEQ ID NO: 83090 - DNA, 21 bp, Homo sapiens
ggcagccacttgccaacttac

SEQ ID NO: 83091 - DNA, 19 bp, Homo sapiens
cagaacctgggaaagttat

SEQ ID NO: 83092 - DNA, 19 bp, Homo sapiens
cagcttctactcgaacacg

SEQ ID NO: 83093 - DNA, 17 bp, Homo sapiens
ttgcatctgcacatttt

SEQ ID NO: 83094 - DNA, 22 bp, Homo sapiens
caaacaaggaagagaaatgagg

SEQ ID NO: 83095 - DNA, 19 bp, Homo sapiens
tcttgacttcttgagatct

SEQ ID NO: 83096 - DNA, 16 bp, Homo sapiens
ccacctgtctttcctt

SEQ ID NO: 83097 - DNA, 18 bp, Homo sapiens
tgcttactggaacattat

SEQ ID NO: 83098 - DNA, 22 bp, Homo sapiens
tatactagtaagctgatatttt

SEQ ID NO: 83099 - DNA, 18 bp, Homo sapiens
tttttgccaccatttcct

SEQ ID NO: 83100 - DNA, 17 bp, Homo sapiens
aggtcagagcattgggt

SEQ ID NO: 83101 - DNA, 17 bp, Homo sapiens
aaaaggcaagtgttcat

SEQ ID NO: 83102 - DNA, 17 bp, Homo sapiens
ggcgtcatttgctaatc

SEQ ID NO: 83103 - DNA, 19 bp, Homo sapiens
ttgtccaagagcttctacg

SEQ ID NO: 83104 - DNA, 16 bp, Homo sapiens
ctgagcctgaagagcc

SEQ ID NO: 83105 - DNA, 24 bp, Homo sapiens
agagaaaaataaagagtctcttaa

SEQ ID NO: 83106 - DNA, 21 bp, Homo sapiens
tctacaccaacgccaagggca

SEQ ID NO: 83107 - DNA, 21 bp, Homo sapiens
cgatggagacagacagttttt

SEQ ID NO: 83108 - DNA, 20 bp, Homo sapiens
gaaggcgaggtcaagtgccc

SEQ ID NO: 83109 - DNA, 20 bp, Homo sapiens
gagcttcttcctgctttggg

SEQ ID NO: 83110 - DNA, 16 bp, Homo sapiens
tctccagaaggcagta

SEQ ID NO: 83111 - DNA, 20 bp, Homo sapiens
cccatcgaaggcagagatgg

SEQ ID NO: 83112 - DNA, 19 bp, Homo sapiens
aacaagcaagcccttagga

SEQ ID NO: 83113 - DNA, 20 bp, Homo sapiens
gaggggtagttggtctgcag

SEQ ID NO: 83114 - DNA, 23 bp, Homo sapiens
ggaaatgaagtgtgtgagtgaac

SEQ ID NO: 83115 - DNA, 17 bp, Homo sapiens
ggcttttcaaatagccc

SEQ ID NO: 83116 - DNA, 18 bp, Homo sapiens
ggaattcacttctcttcc

SEQ ID NO: 83117 - DNA, 21 bp, Homo sapiens
accacccactgcccatccctt

SEQ ID NO: 83118 - DNA, 23 bp, Homo sapiens
cacccgccttttcctacaaccac

SEQ ID NO: 83119 - DNA, 25 bp, Homo sapiens
ttattttattttattttatttgagg

SEQ ID NO: 83120 - DNA, 16 bp, Homo sapiens
gtagtccaatcagggc

SEQ ID NO: 83121 - DNA, 18 bp, Homo sapiens
tacttgcatcttccatga

SEQ ID NO: 83122 - DNA, 17 bp, Homo sapiens
gctgtgtaagtaccaga

SEQ ID NO: 83123 - DNA, 18 bp, Homo sapiens
gctctcgctttcccctgt

SEQ ID NO: 83124 - DNA, 22 bp, Homo sapiens
agaatgctcttctggagcagca

SEQ ID NO: 83125 - DNA, 16 bp, Homo sapiens
cccaagaagcaggacc

SEQ ID NO: 83126 - DNA, 16 bp, Homo sapiens
gcgaaggaaaaaccac

SEQ ID NO: 83127 - DNA, 20 bp, Homo sapiens
tctgcaggcccaggtgccaa

SEQ ID NO: 83128 - DNA, 24 bp, Homo sapiens
ctttttctcatattgccacaggca

SEQ ID NO: 83129 - DNA, 20 bp, Homo sapiens
cccacgagctcgggtgctca

SEQ ID NO: 83130 - DNA, 23 bp, Homo sapiens
ttgctgcaggccaggttccctca

SEQ ID NO: 83131 - DNA, 23 bp, Homo sapiens
cgtcaatatcttgctggtgtgtg

SEQ ID NO: 83132 - DNA, 22 bp, Homo sapiens
attgtatttcttcagccttttc

SEQ ID NO: 83133 - DNA, 17 bp, Homo sapiens
tgtctaggatttgggcc

SEQ ID NO: 83134 - DNA, 16 bp, Homo sapiens
cagcacagacccatgg

SEQ ID NO: 83135 - DNA, 23 bp, Homo sapiens
cacaccttcatttcaagctacca

SEQ ID NO: 83136 - DNA, 18 bp, Homo sapiens
cacaggaccattttgctg

SEQ ID NO: 83137 - DNA, 21 bp, Homo sapiens
cttttggaaattgtgtactcc

SEQ ID NO: 83138 - DNA, 18 bp, Homo sapiens
attaaagccaggagtaag

SEQ ID NO: 83139 - DNA, 22 bp, Homo sapiens
tttattacttgtgaaattaatt

SEQ ID NO: 83140 - DNA, 17 bp, Homo sapiens
ttttcttgtgcacttgg

SEQ ID NO: 83141 - DNA, 23 bp, Homo sapiens
tcactggaatttttttttttgga

SEQ ID NO: 83142 - DNA, 19 bp, Homo sapiens
tttgacgatgaaggacagg

SEQ ID NO: 83143 - DNA, 20 bp, Homo sapiens
gcaaattctaaagagtagtc

SEQ ID NO: 83144 - DNA, 20 bp, Homo sapiens
taaactggagtacgtaaggt

SEQ ID NO: 83145 - DNA, 17 bp, Homo sapiens
ttcacagtttgcgggac

SEQ ID NO: 83146 - DNA, 22 bp, Homo sapiens
catgctacctgaatatctctga

SEQ ID NO: 83147 - DNA, 18 bp, Homo sapiens
cgggctcatcataatgca

SEQ ID NO: 83148 - DNA, 20 bp, Homo sapiens
ctctgcaacaagttccaagc

SEQ ID NO: 83149 - DNA, 16 bp, Homo sapiens
aagcaaaaggagtgac

SEQ ID NO: 83150 - DNA, 24 bp, Homo sapiens
accttctctccttggagtgatggg

SEQ ID NO: 83151 - DNA, 18 bp, Homo sapiens
cagtccactcgccaggga

SEQ ID NO: 83152 - DNA, 19 bp, Homo sapiens
gttttcgttccagtgcatt

SEQ ID NO: 83153 - DNA, 17 bp, Homo sapiens
tttagcagagcctaatt

SEQ ID NO: 83154 - DNA, 16 bp, Homo sapiens
caccctccagaaccag

SEQ ID NO: 83155 - DNA, 24 bp, Homo sapiens
atattttctatttttttttttctc

SEQ ID NO: 83156 - DNA, 23 bp, Homo sapiens
taaaagtaatagtacgatctctt

SEQ ID NO: 83157 - DNA, 23 bp, Homo sapiens
gcttcctctgccgccggcatttt

SEQ ID NO: 83158 - DNA, 22 bp, Homo sapiens
ctgaacggaaataaaaatgaaa

SEQ ID NO: 83159 - DNA, 16 bp, Homo sapiens
tgggggcaaggggtgg

SEQ ID NO: 83160 - DNA, 24 bp, Homo sapiens
tccctgggccgtaggaaatgagcg

SEQ ID NO: 83161 - DNA, 24 bp, Homo sapiens
cgaggggaaggggaaggaggcggc

SEQ ID NO: 83162 - DNA, 21 bp, Homo sapiens
gacttccccctccccttcacc

SEQ ID NO: 83163 - DNA, 16 bp, Homo sapiens
ctgtccccgcctgaca

SEQ ID NO: 83164 - DNA, 16 bp, Homo sapiens
gagtgagtgagtgagt

SEQ ID NO: 83165 - DNA, 16 bp, Homo sapiens
cacctcgatgtcatcg

SEQ ID NO: 83166 - DNA, 24 bp, Homo sapiens
ctagcatggaaacttaagacaaaa

SEQ ID NO: 83167 - DNA, 17 bp, Homo sapiens
ccaaaacagtaggccag

SEQ ID NO: 83168 - DNA, 20 bp, Homo sapiens
tggtcctcgaaccacaacct

SEQ ID NO: 83169 - DNA, 16 bp, Homo sapiens
ttctgagacccggtca

SEQ ID NO: 83170 - DNA, 24 bp, Homo sapiens
gccgattgtagcctatcagtatac

SEQ ID NO: 83171 - DNA, 16 bp, Homo sapiens
ggcctggcaatgccca

SEQ ID NO: 83172 - DNA, 22 bp, Homo sapiens
gatggtctctaccatgctatct

SEQ ID NO: 83173 - DNA, 19 bp, Homo sapiens
taaataccttcaatgctct

SEQ ID NO: 83174 - DNA, 20 bp, Homo sapiens
cttacagcccccggacccct

SEQ ID NO: 83175 - DNA, 20 bp, Homo sapiens
tgtgagaagtgtgcaaatat

SEQ ID NO: 83176 - DNA, 16 bp, Homo sapiens
atggagcaattgggca

SEQ ID NO: 83177 - DNA, 21 bp, Homo sapiens
tagcttcctcctctgaaaaaa

SEQ ID NO: 83178 - DNA, 20 bp, Homo sapiens
ggccatgaatcttgtgggcc

SEQ ID NO: 83179 - DNA, 24 bp, Homo sapiens
gtatgtgtctgtttctgcaactaa

SEQ ID NO: 83180 - DNA, 17 bp, Homo sapiens
caaaaggacccaaatgc

SEQ ID NO: 83181 - DNA, 23 bp, Homo sapiens
atttttctctccccacagcagaa

SEQ ID NO: 83182 - DNA, 19 bp, Homo sapiens
ctcactaaagtccttagga

SEQ ID NO: 83183 - DNA, 22 bp, Homo sapiens
attggttgaaattaattgaatt

SEQ ID NO: 83184 - DNA, 17 bp, Homo sapiens
aggcatatctgttacct

SEQ ID NO: 83185 - DNA, 22 bp, Homo sapiens
gtggagctcatgaaggacttca

SEQ ID NO: 83186 - DNA, 20 bp, Homo sapiens
gctgatgttagaatttctga

SEQ ID NO: 83187 - DNA, 17 bp, Homo sapiens
ttgactggagacaacat

SEQ ID NO: 83188 - DNA, 22 bp, Homo sapiens
tctacttacaaatacacatggg

SEQ ID NO: 83189 - DNA, 16 bp, Homo sapiens
atccctgtcctgttgg

SEQ ID NO: 83190 - DNA, 21 bp, Homo sapiens
atctaactggatcctagaggg

SEQ ID NO: 83191 - DNA, 17 bp, Homo sapiens
ggaactctcgactgaac

SEQ ID NO: 83192 - DNA, 20 bp, Homo sapiens
acagattctgacctttggct

SEQ ID NO: 83193 - DNA, 16 bp, Homo sapiens
acccacttgcccaagc

SEQ ID NO: 83194 - DNA, 18 bp, Homo sapiens
tcttggccgttcctcaaa

SEQ ID NO: 83195 - DNA, 16 bp, Homo sapiens
atccctgccatcagca

SEQ ID NO: 83196 - DNA, 23 bp, Homo sapiens
gaaaacacccctgacactgcaga

SEQ ID NO: 83197 - DNA, 21 bp, Homo sapiens
accagagatttctgaaaaatt

SEQ ID NO: 83198 - DNA, 20 bp, Homo sapiens
atccggaacatgactatcca

SEQ ID NO: 83199 - DNA, 18 bp, Homo sapiens
tcctcccttcatcttctc

SEQ ID NO: 83200 - DNA, 23 bp, Homo sapiens
ttttgtttccaaaatatgcgtat

SEQ ID NO: 83201 - DNA, 16 bp, Homo sapiens
tccaagcatccccgca

SEQ ID NO: 83202 - DNA, 20 bp, Homo sapiens
agacattcaccaaatttgat

SEQ ID NO: 83203 - DNA, 16 bp, Homo sapiens
ggaggattctgtgact

SEQ ID NO: 83204 - DNA, 17 bp, Homo sapiens
agaaactcctttacgag

SEQ ID NO: 83205 - DNA, 22 bp, Homo sapiens
aaggacagactttctgggtgtg

SEQ ID NO: 83206 - DNA, 18 bp, Homo sapiens
tgacctcgtgatctgccc

SEQ ID NO: 83207 - DNA, 18 bp, Homo sapiens
cccggccccagaaacgat

SEQ ID NO: 83208 - DNA, 18 bp, Homo sapiens
tcgtctagcatcttctct

SEQ ID NO: 83209 - DNA, 22 bp, Homo sapiens
cacatataacaccaaaccacat

SEQ ID NO: 83210 - DNA, 18 bp, Homo sapiens
gggactccatttacacgt

SEQ ID NO: 83211 - DNA, 17 bp, Homo sapiens
atctacaaggacagaga

SEQ ID NO: 83212 - DNA, 16 bp, Homo sapiens
catacagctgctttgt

SEQ ID NO: 83213 - DNA, 21 bp, Homo sapiens
agatgaggataaggatccaga

SEQ ID NO: 83214 - DNA, 24 bp, Homo sapiens
ggcacatatataataagtaaacaa

SEQ ID NO: 83215 - DNA, 20 bp, Homo sapiens
tgattggcacaagagtaggt

SEQ ID NO: 83216 - DNA, 19 bp, Homo sapiens
agaaaaatgagacacagcc

SEQ ID NO: 83217 - DNA, 24 bp, Homo sapiens
gctatgtacagagaaaactttagg

SEQ ID NO: 83218 - DNA, 19 bp, Homo sapiens
gctcattcattcagcagtt

SEQ ID NO: 83219 - DNA, 17 bp, Homo sapiens
tttggcacacctaatac

SEQ ID NO: 83220 - DNA, 19 bp, Homo sapiens
ctttccctctgtacacagt

SEQ ID NO: 83221 - DNA, 20 bp, Homo sapiens
ataagctccttgaagccata

SEQ ID NO: 83222 - DNA, 17 bp, Homo sapiens
tcacaacttcacatcaa

SEQ ID NO: 83223 - DNA, 18 bp, Homo sapiens
ggcctaacaaaggcaata

SEQ ID NO: 83224 - DNA, 16 bp, Homo sapiens
ctccagtctgggcgac

SEQ ID NO: 83225 - DNA, 16 bp, Homo sapiens
ctacaggctcccacca

SEQ ID NO: 83226 - DNA, 16 bp, Homo sapiens
aaagaagcgggtagtt

SEQ ID NO: 83227 - DNA, 16 bp, Homo sapiens
agaagcagggctccca

SEQ ID NO: 83228 - DNA, 24 bp, Homo sapiens
tggaatatttcacgttaagtgttt

SEQ ID NO: 83229 - DNA, 16 bp, Homo sapiens
gatggcaccttgggac

SEQ ID NO: 83230 - DNA, 19 bp, Homo sapiens
aaattaactttgccatgtt

SEQ ID NO: 83231 - DNA, 16 bp, Homo sapiens
aggctgctggggcgac

SEQ ID NO: 83232 - DNA, 24 bp, Homo sapiens
tatgagccgcacagcctacacggt

SEQ ID NO: 83233 - DNA, 22 bp, Homo sapiens
ctggactccagcacctcctccc

SEQ ID NO: 83234 - DNA, 24 bp, Homo sapiens
gctgaagggaaaaagaaagggtcc

SEQ ID NO: 83235 - DNA, 24 bp, Homo sapiens
ctgggttttgcaccagtctcgctt

SEQ ID NO: 83236 - DNA, 22 bp, Homo sapiens
acaatgactcagagcagactca

SEQ ID NO: 83237 - DNA, 22 bp, Homo sapiens
ttgatgatggtgcgactgttgc

SEQ ID NO: 83238 - DNA, 19 bp, Homo sapiens
caagggcggggcactgcca

SEQ ID NO: 83239 - DNA, 23 bp, Homo sapiens
ggaaccttcctccttccggatgt

SEQ ID NO: 83240 - DNA, 22 bp, Homo sapiens
tgtgacggagcgcaaatacctg

SEQ ID NO: 83241 - DNA, 19 bp, Homo sapiens
accatcatggtagtgaatt

SEQ ID NO: 83242 - DNA, 19 bp, Homo sapiens
cacgaggaaggctgcaaca

SEQ ID NO: 83243 - DNA, 19 bp, Homo sapiens
ttcacacgtgtgactctct

SEQ ID NO: 83244 - DNA, 18 bp, Homo sapiens
ctttctacatccccaggc

SEQ ID NO: 83245 - DNA, 16 bp, Homo sapiens
catgctgggtgcacct

SEQ ID NO: 83246 - DNA, 19 bp, Homo sapiens
tctgcaagcccaagaaatt

SEQ ID NO: 83247 - DNA, 18 bp, Homo sapiens
gtttaagccaagtaagaa

SEQ ID NO: 83248 - DNA, 24 bp, Homo sapiens
aactacagccacctaccaagaaga

SEQ ID NO: 83249 - DNA, 16 bp, Homo sapiens
acgaactacgcacaag

SEQ ID NO: 83250 - DNA, 22 bp, Homo sapiens
aaacagtctattgaccaaaaaa

SEQ ID NO: 83251 - DNA, 17 bp, Homo sapiens
ggctgagtgacgttcta

SEQ ID NO: 83252 - DNA, 17 bp, Homo sapiens
atgcctgtttgaatcaa

SEQ ID NO: 83253 - DNA, 18 bp, Homo sapiens
cagtcaaaacacttacga

SEQ ID NO: 83254 - DNA, 21 bp, Homo sapiens
tgcaaagtacctaactccact

SEQ ID NO: 83255 - DNA, 23 bp, Homo sapiens
tttaaagagaagatatctcatgt

SEQ ID NO: 83256 - DNA, 19 bp, Homo sapiens
aataatctacaggagcaac

SEQ ID NO: 83257 - DNA, 20 bp, Homo sapiens
agtgggaaaatcaatgaatc

SEQ ID NO: 83258 - DNA, 20 bp, Homo sapiens
tctttcaaaaccaaaatttt

SEQ ID NO: 83259 - DNA, 24 bp, Homo sapiens
caatttaagttacctgataaattt

SEQ ID NO: 83260 - DNA, 19 bp, Homo sapiens
tagttacagatacattgtt

SEQ ID NO: 83261 - DNA, 19 bp, Homo sapiens
acaattaatgtaacctgtg

SEQ ID NO: 83262 - DNA, 19 bp, Homo sapiens
aggaaaagtcttcggtaac

SEQ ID NO: 83263 - DNA, 21 bp, Homo sapiens
tcttaaaatggatccatctaa

SEQ ID NO: 83264 - DNA, 16 bp, Homo sapiens
agaagtccttgaccct

SEQ ID NO: 83265 - DNA, 21 bp, Homo sapiens
aaaaagaaaacatcttcagat

SEQ ID NO: 83266 - DNA, 19 bp, Homo sapiens
gcaagaaatctggcaataa

SEQ ID NO: 83267 - DNA, 23 bp, Homo sapiens
tattaagaaataaagatgttaat

SEQ ID NO: 83268 - DNA, 20 bp, Homo sapiens
ccgggatttctttacagttg

SEQ ID NO: 83269 - DNA, 18 bp, Homo sapiens
cccaacaccacaaatcag

SEQ ID NO: 83270 - DNA, 23 bp, Homo sapiens
caatcattgatggtacttaaaga

SEQ ID NO: 83271 - DNA, 19 bp, Homo sapiens
aacacagagaggtggatca

SEQ ID NO: 83272 - DNA, 21 bp, Homo sapiens
gggtggtgtaacaaatgattt

SEQ ID NO: 83273 - DNA, 17 bp, Homo sapiens
atgcactacccaaaaca

SEQ ID NO: 83274 - DNA, 19 bp, Homo sapiens
ttctcttacccttttttga

SEQ ID NO: 83275 - DNA, 19 bp, Homo sapiens
atttagttcttcaccagat

SEQ ID NO: 83276 - DNA, 18 bp, Homo sapiens
ggtggaggcaaatcagtc

SEQ ID NO: 83277 - DNA, 22 bp, Homo sapiens
gactttgatacttctgagactt

SEQ ID NO: 83278 - DNA, 18 bp, Homo sapiens
aaccattctgagtcatcc

SEQ ID NO: 83279 - DNA, 20 bp, Homo sapiens
taagagtaagcactgctcag

SEQ ID NO: 83280 - DNA, 22 bp, Homo sapiens
agcatcttcatttatatgcact

SEQ ID NO: 83281 - DNA, 18 bp, Homo sapiens
acaacaaacacagtaaag

SEQ ID NO: 83282 - DNA, 22 bp, Homo sapiens
agataaaataattgttacctct

SEQ ID NO: 83283 - DNA, 17 bp, Homo sapiens
actgaggaacagaagga

SEQ ID NO: 83284 - DNA, 16 bp, Homo sapiens
ttcccaatggctagct

SEQ ID NO: 83285 - DNA, 20 bp, Homo sapiens
tcgatgatggccccattgct

SEQ ID NO: 83286 - DNA, 21 bp, Homo sapiens
cagattattcaaaaagcacca

SEQ ID NO: 83287 - DNA, 23 bp, Homo sapiens
ctctgaaaactcatttggaagat

SEQ ID NO: 83288 - DNA, 18 bp, Homo sapiens
gaataaataagccagcat

SEQ ID NO: 83289 - DNA, 21 bp, Homo sapiens
cagttgaatgtaattcagctt

SEQ ID NO: 83290 - DNA, 17 bp, Homo sapiens
tgtttgtgacttgccag

SEQ ID NO: 83291 - DNA, 18 bp, Homo sapiens
gaaggtggaacaaaatcc

SEQ ID NO: 83292 - DNA, 21 bp, Homo sapiens
tcattagtggttaacaaatct

SEQ ID NO: 83293 - DNA, 20 bp, Homo sapiens
tagctagtttacctaaggca

SEQ ID NO: 83294 - DNA, 18 bp, Homo sapiens
agaagaagaatttggaag

SEQ ID NO: 83295 - DNA, 25 bp, Homo sapiens
tattataaactaaattaaacaattt

SEQ ID NO: 83296 - DNA, 20 bp, Homo sapiens
tgatgatgatgattatgata

SEQ ID NO: 83297 - DNA, 21 bp, Homo sapiens
ggctttcacttgaatgtaaaa

SEQ ID NO: 83298 - DNA, 16 bp, Homo sapiens
tcctcttcaaaatgcc

SEQ ID NO: 83299 - DNA, 23 bp, Homo sapiens
accagctaaagaagttttataat

SEQ ID NO: 83300 - DNA, 17 bp, Homo sapiens
agatcttttgatgtgct

SEQ ID NO: 83301 - DNA, 19 bp, Homo sapiens
tctgatcagtggtagaaaa

SEQ ID NO: 83302 - DNA, 17 bp, Homo sapiens
gtgctggtttctggatt

SEQ ID NO: 83303 - DNA, 17 bp, Homo sapiens
gtatgattggcttaaca

SEQ ID NO: 83304 - DNA, 20 bp, Homo sapiens
cgttgttttcaaaagtaagt

SEQ ID NO: 83305 - DNA, 19 bp, Homo sapiens
cagaaaagaggatgttctt

SEQ ID NO: 83306 - DNA, 23 bp, Homo sapiens
ctacaaatctgccattttataac

SEQ ID NO: 83307 - DNA, 16 bp, Homo sapiens
tgcaggagctgaatcc

SEQ ID NO: 83308 - DNA, 19 bp, Homo sapiens
ttcaggcaaatgctggcta

SEQ ID NO: 83309 - DNA, 16 bp, Homo sapiens
tgaataagctgctgct

SEQ ID NO: 83310 - DNA, 16 bp, Homo sapiens
ctgccttggcctcccc

SEQ ID NO: 83311 - DNA, 20 bp, Homo sapiens
cacaatccaaaagtttcagt

SEQ ID NO: 83312 - DNA, 24 bp, Homo sapiens
atgcctagccaagacttttttttt

SEQ ID NO: 83313 - DNA, 16 bp, Homo sapiens
ccagaagggggaaaat

SEQ ID NO: 83314 - DNA, 17 bp, Homo sapiens
gataagtttacagcagc

SEQ ID NO: 83315 - DNA, 22 bp, Homo sapiens
cagaaagcctgaacattttgcc

SEQ ID NO: 83316 - DNA, 19 bp, Homo sapiens
ttgatactattcctgatga

SEQ ID NO: 83317 - DNA, 24 bp, Homo sapiens
tttgaaaagtaaacaaatcaaaaa

SEQ ID NO: 83318 - DNA, 21 bp, Homo sapiens
agcagcggaacataaggtatc

SEQ ID NO: 83319 - DNA, 19 bp, Homo sapiens
cgttagaagtttccttctg

SEQ ID NO: 83320 - DNA, 24 bp, Homo sapiens
aacattcgtattcatgtttttaag

SEQ ID NO: 83321 - DNA, 16 bp, Homo sapiens
tctccacaatgagcca

SEQ ID NO: 83322 - DNA, 21 bp, Homo sapiens
atttggtatgaaaactacaga

SEQ ID NO: 83323 - DNA, 17 bp, Homo sapiens
tagaattccctgtaggg

SEQ ID NO: 83324 - DNA, 19 bp, Homo sapiens
gttgttctcttttctctct

SEQ ID NO: 83325 - DNA, 16 bp, Homo sapiens
taaacagtccccagga

SEQ ID NO: 83326 - DNA, 19 bp, Homo sapiens
aaagtgatgccagtcttct

SEQ ID NO: 83327 - DNA, 18 bp, Homo sapiens
aaaggcctttcaaaaaga

SEQ ID NO: 83328 - DNA, 19 bp, Homo sapiens
ctatggagggtgattcctg

SEQ ID NO: 83329 - DNA, 16 bp, Homo sapiens
tggtgtttcagcccag

SEQ ID NO: 83330 - DNA, 20 bp, Homo sapiens
ctcaaattctgtttctcctg

SEQ ID NO: 83331 - DNA, 16 bp, Homo sapiens
agcagtgcttgtgaga

SEQ ID NO: 83332 - DNA, 16 bp, Homo sapiens
ctctgccaccaggaag

SEQ ID NO: 83333 - DNA, 17 bp, Homo sapiens
ggaaggttgggtttctc

SEQ ID NO: 83334 - DNA, 17 bp, Homo sapiens
gtaagtagcaactgggc

SEQ ID NO: 83335 - DNA, 18 bp, Homo sapiens
atgtcttcccagtcatca

SEQ ID NO: 83336 - DNA, 24 bp, Homo sapiens
aagctcttatttcccaggaaatgt

SEQ ID NO: 83337 - DNA, 20 bp, Homo sapiens
gaccttccttgatgggttga

SEQ ID NO: 83338 - DNA, 24 bp, Homo sapiens
aataaatgacttagaaagagaaac

SEQ ID NO: 83339 - DNA, 18 bp, Homo sapiens
actggaagacagtctgtc

SEQ ID NO: 83340 - DNA, 21 bp, Homo sapiens
actttgatgatgatgatgact

SEQ ID NO: 83341 - DNA, 23 bp, Homo sapiens
ttattttaaacttaccagtataa

SEQ ID NO: 83342 - DNA, 16 bp, Homo sapiens
ccacagctgcctatca

SEQ ID NO: 83343 - DNA, 22 bp, Homo sapiens
tggtttttcttatataattcct

SEQ ID NO: 83344 - DNA, 19 bp, Homo sapiens
aaagactttcctcagccaa

SEQ ID NO: 83345 - DNA, 19 bp, Homo sapiens
tcatcagtagaaatttgca

SEQ ID NO: 83346 - DNA, 18 bp, Homo sapiens
ctcagagtcaattcagaa

SEQ ID NO: 83347 - DNA, 19 bp, Homo sapiens
gtttcagatttctggatgc

SEQ ID NO: 83348 - DNA, 16 bp, Homo sapiens
agaactgtgctgcagg

SEQ ID NO: 83349 - DNA, 22 bp, Homo sapiens
atgaaaaatcttcatcatttcc

SEQ ID NO: 83350 - DNA, 19 bp, Homo sapiens
gctaaagctgtactttcac

SEQ ID NO: 83351 - DNA, 18 bp, Homo sapiens
gcagcattgatcgcctct

SEQ ID NO: 83352 - DNA, 18 bp, Homo sapiens
agacaagtcagcacaaaa

SEQ ID NO: 83353 - DNA, 20 bp, Homo sapiens
cctgccaattcacttctaaa

SEQ ID NO: 83354 - DNA, 17 bp, Homo sapiens
tttcctcatacaaagga

SEQ ID NO: 83355 - DNA, 19 bp, Homo sapiens
tgtgtaggtggtcttttta

SEQ ID NO: 83356 - DNA, 17 bp, Homo sapiens
actaatcagctagaggc

SEQ ID NO: 83357 - DNA, 17 bp, Homo sapiens
tgctttctcactatggt

SEQ ID NO: 83358 - DNA, 21 bp, Homo sapiens
tatcctgatgccgactggtat

SEQ ID NO: 83359 - DNA, 25 bp, Homo sapiens
ttgcctaaatataatagtttgagtc

SEQ ID NO: 83360 - DNA, 17 bp, Homo sapiens
ccccaggagaaacacag

SEQ ID NO: 83361 - DNA, 18 bp, Homo sapiens
atatgccttggtgtccta

SEQ ID NO: 83362 - DNA, 18 bp, Homo sapiens
aggaagtcagcttttgga

SEQ ID NO: 83363 - DNA, 16 bp, Homo sapiens
acagaacctgacagat

SEQ ID NO: 83364 - DNA, 21 bp, Homo sapiens
agaggactgaaatttaattgt

SEQ ID NO: 83365 - DNA, 16 bp, Homo sapiens
ccagctccctgcctgt

SEQ ID NO: 83366 - DNA, 18 bp, Homo sapiens
actgctgtgctttatttt

SEQ ID NO: 83367 - DNA, 16 bp, Homo sapiens
tcgtagatcaagtcca

SEQ ID NO: 83368 - DNA, 19 bp, Homo sapiens
aaatgtatgtacttacata

SEQ ID NO: 83369 - DNA, 22 bp, Homo sapiens
aatatttgtagcttctgagtca

SEQ ID NO: 83370 - DNA, 20 bp, Homo sapiens
aggtttgatatgtgactaat

SEQ ID NO: 83371 - DNA, 18 bp, Homo sapiens
accttttctggagtgaca

SEQ ID NO: 83372 - DNA, 22 bp, Homo sapiens
aatgtataaaattgaaattgtt

SEQ ID NO: 83373 - DNA, 29 bp, Homo sapiens
ttgttaaaatcttaaaaatatatgtattc

SEQ ID NO: 83374 - DNA, 19 bp, Homo sapiens
ggtgataagactgactcag

SEQ ID NO: 83375 - DNA, 19 bp, Homo sapiens
gggtttctggatgaaagtt

SEQ ID NO: 83376 - DNA, 23 bp, Homo sapiens
gacccaatcataaaacttctata

SEQ ID NO: 83377 - DNA, 17 bp, Homo sapiens
cctcggcttcccaaagt

SEQ ID NO: 83378 - DNA, 18 bp, Homo sapiens
gcttcctctcatagagat

SEQ ID NO: 83379 - DNA, 23 bp, Homo sapiens
tttaatacagcttaagttgtgat

SEQ ID NO: 83380 - DNA, 23 bp, Homo sapiens
tataaaaaacagtatttacctga

SEQ ID NO: 83381 - DNA, 22 bp, Homo sapiens
gtgtttcagtgtttttacatgt

SEQ ID NO: 83382 - DNA, 22 bp, Homo sapiens
tgtgggtttttattcagtaaat

SEQ ID NO: 83383 - DNA, 18 bp, Homo sapiens
tcatttctactctggaga

SEQ ID NO: 83384 - DNA, 21 bp, Homo sapiens
ctcaatgtattaagaactacc

SEQ ID NO: 83385 - DNA, 19 bp, Homo sapiens
gcacattgtgtcagtcagg

SEQ ID NO: 83386 - DNA, 20 bp, Homo sapiens
acatactaccaacaatatat

SEQ ID NO: 83387 - DNA, 18 bp, Homo sapiens
ttctggcgaagcatattc

SEQ ID NO: 83388 - DNA, 22 bp, Homo sapiens
ttttactgaagaataaggtagt

SEQ ID NO: 83389 - DNA, 16 bp, Homo sapiens
tctgtaccctgggatt

SEQ ID NO: 83390 - DNA, 21 bp, Homo sapiens
aggaagctccaagtagtctga

SEQ ID NO: 83391 - DNA, 16 bp, Homo sapiens
atacgtgacgtgcaac

SEQ ID NO: 83392 - DNA, 24 bp, Homo sapiens
gattttcgtcaagattacaaaaga

SEQ ID NO: 83393 - DNA, 20 bp, Homo sapiens
agcgccacaggtgattctaa

SEQ ID NO: 83394 - DNA, 24 bp, Homo sapiens
gtgatggctcttacggccacagct

SEQ ID NO: 83395 - DNA, 16 bp, Homo sapiens
ctgccatcgggttaca

SEQ ID NO: 83396 - DNA, 16 bp, Homo sapiens
cagacctcaggtgtaa

SEQ ID NO: 83397 - DNA, 17 bp, Homo sapiens
aactccacccctcatga

SEQ ID NO: 83398 - DNA, 18 bp, Homo sapiens
tttaggctttttcggtaa

SEQ ID NO: 83399 - DNA, 20 bp, Homo sapiens
tgggggttaggattttaggg

SEQ ID NO: 83400 - DNA, 17 bp, Homo sapiens
tgtactcacatgggtgg

SEQ ID NO: 83401 - DNA, 25 bp, Homo sapiens
tattttctcataataactaaatttt

SEQ ID NO: 83402 - DNA, 23 bp, Homo sapiens
tttatatatcttattgtggtact

SEQ ID NO: 83403 - DNA, 22 bp, Homo sapiens
ataatctgaaatactatgtatt

SEQ ID NO: 83404 - DNA, 20 bp, Homo sapiens
tgctctataaagagcaagtt

SEQ ID NO: 83405 - DNA, 20 bp, Homo sapiens
cctagaatggatcagaaagc

SEQ ID NO: 83406 - DNA, 16 bp, Homo sapiens
tcgcctggagaggcag

SEQ ID NO: 83407 - DNA, 24 bp, Homo sapiens
ccagcagtataagaacactacggg

SEQ ID NO: 83408 - DNA, 17 bp, Homo sapiens
gccagcatggtaagcaa

SEQ ID NO: 83409 - DNA, 21 bp, Homo sapiens
ttgtgtttttgtttatgttaa

SEQ ID NO: 83410 - DNA, 18 bp, Homo sapiens
tgacagccatcctgatta

SEQ ID NO: 83411 - DNA, 20 bp, Homo sapiens
gggataatttactgcctctc

SEQ ID NO: 83412 - DNA, 19 bp, Homo sapiens
gcatgtttggttatatgct

SEQ ID NO: 83413 - DNA, 18 bp, Homo sapiens
acagagagatgggctcgc

SEQ ID NO: 83414 - DNA, 22 bp, Homo sapiens
cagtcttattttgatgtttact

SEQ ID NO: 83415 - DNA, 17 bp, Homo sapiens
aagtgcagcagaagtgg

SEQ ID NO: 83416 - DNA, 25 bp, Homo sapiens
tttttttatgaaagaaaaagcaact

SEQ ID NO: 83417 - DNA, 19 bp, Homo sapiens
actaaatagttggaccaag

SEQ ID NO: 83418 - DNA, 18 bp, Homo sapiens
aatcacaaatcgcacgtc

SEQ ID NO: 83419 - DNA, 21 bp, Homo sapiens
agtaaaacaaatgatagagct

SEQ ID NO: 83420 - DNA, 16 bp, Homo sapiens
tccagctctgccagat

SEQ ID NO: 83421 - DNA, 21 bp, Homo sapiens
gccttatgaatctaataagct

SEQ ID NO: 83422 - DNA, 17 bp, Homo sapiens
tcagtctggtcacatca

SEQ ID NO: 83423 - DNA, 21 bp, Homo sapiens
catttggaatggggattgaca

SEQ ID NO: 83424 - DNA, 18 bp, Homo sapiens
aggctgaagatgacagaa

SEQ ID NO: 83425 - DNA, 21 bp, Homo sapiens
aatctgtggagggttactacc

SEQ ID NO: 83426 - DNA, 20 bp, Homo sapiens
gattatttaaggaaaactgg

SEQ ID NO: 83427 - DNA, 19 bp, Homo sapiens
gcctgcttttctataccta

SEQ ID NO: 83428 - DNA, 26 bp, Homo sapiens
ttttataataaaaatgaactaaaata

SEQ ID NO: 83429 - DNA, 24 bp, Homo sapiens
ttataatatagaatgccatgttga

SEQ ID NO: 83430 - DNA, 17 bp, Homo sapiens
tgtaccatgctatacaa

SEQ ID NO: 83431 - DNA, 26 bp, Homo sapiens
ttaaagttatatgaatctattctaaa

SEQ ID NO: 83432 - DNA, 17 bp, Homo sapiens
tccattttcaccaaagt

SEQ ID NO: 83433 - DNA, 24 bp, Homo sapiens
agtatgtcttactatagtcttcat

SEQ ID NO: 83434 - DNA, 20 bp, Homo sapiens
tgttttacagcaattatcac

SEQ ID NO: 83435 - DNA, 18 bp, Homo sapiens
gagaaactcacttcaata

SEQ ID NO: 83436 - DNA, 25 bp, Homo sapiens
tttttaaagtaagagaaaaaaaatt

SEQ ID NO: 83437 - DNA, 20 bp, Homo sapiens
ggagaatacagcttttggcc

SEQ ID NO: 83438 - DNA, 19 bp, Homo sapiens
ctttcccctgttaatctgt

SEQ ID NO: 83439 - DNA, 16 bp, Homo sapiens
acacccagatgtttct

SEQ ID NO: 83440 - DNA, 22 bp, Homo sapiens
agttgttctagaacttagataa

SEQ ID NO: 83441 - DNA, 21 bp, Homo sapiens
caatacttttcacatcgtcag

SEQ ID NO: 83442 - DNA, 17 bp, Homo sapiens
ttggtctggaaatgggt

SEQ ID NO: 83443 - DNA, 19 bp, Homo sapiens
ccagaaggacctacatgtt

SEQ ID NO: 83444 - DNA, 18 bp, Homo sapiens
tctaggcattgttacctt

SEQ ID NO: 83445 - DNA, 16 bp, Homo sapiens
acagatgacttaccca

SEQ ID NO: 83446 - DNA, 16 bp, Homo sapiens
agatgtgactgacgat

SEQ ID NO: 83447 - DNA, 20 bp, Homo sapiens
agtttttctatgtacttgta

SEQ ID NO: 83448 - DNA, 21 bp, Homo sapiens
tcatcacaaggaatgagaaat

SEQ ID NO: 83449 - DNA, 22 bp, Homo sapiens
ttttgttacttaaaagttttat

SEQ ID NO: 83450 - DNA, 18 bp, Homo sapiens
gctggtcgacattttctt

SEQ ID NO: 83451 - DNA, 22 bp, Homo sapiens
gaaattttagcgttctactcaa

SEQ ID NO: 83452 - DNA, 20 bp, Homo sapiens
cagatccttttccaaatata

SEQ ID NO: 83453 - DNA, 23 bp, Homo sapiens
gggtttgtgatctattccatctg

SEQ ID NO: 83454 - DNA, 17 bp, Homo sapiens
tcttgtcaagtatcagc

SEQ ID NO: 83455 - DNA, 18 bp, Homo sapiens
gagggtgatgatatacgt

SEQ ID NO: 83456 - DNA, 19 bp, Homo sapiens
cgagcatcacataagcgat

SEQ ID NO: 83457 - DNA, 20 bp, Homo sapiens
agagtgcaaaaatccagtca

SEQ ID NO: 83458 - DNA, 22 bp, Homo sapiens
ataaaataaacatgaaaaatac

SEQ ID NO: 83459 - DNA, 22 bp, Homo sapiens
acaatgccgaaagactttttaa

SEQ ID NO: 83460 - DNA, 18 bp, Homo sapiens
gcttggacaaagacacta

SEQ ID NO: 83461 - DNA, 17 bp, Homo sapiens
tgccaatgaccaggcga

SEQ ID NO: 83462 - DNA, 24 bp, Homo sapiens
ttaagaaaaacagaatatgttcgt

SEQ ID NO: 83463 - DNA, 17 bp, Homo sapiens
aatggcaatttaaaggt

SEQ ID NO: 83464 - DNA, 16 bp, Homo sapiens
agatggagaatgcaca

SEQ ID NO: 83465 - DNA, 19 bp, Homo sapiens
ctaacgctttttgtttttt

SEQ ID NO: 83466 - DNA, 16 bp, Homo sapiens
ccccccaaaaatgcaa

SEQ ID NO: 83467 - DNA, 19 bp, Homo sapiens
gcagacttctgtaagttct

SEQ ID NO: 83468 - DNA, 21 bp, Homo sapiens
agtgcacatatacccactcct

SEQ ID NO: 83469 - DNA, 19 bp, Homo sapiens
tgagagtgacggtattaaa

SEQ ID NO: 83470 - DNA, 23 bp, Homo sapiens
aaacagaaaattccagcagtgtg

SEQ ID NO: 83471 - DNA, 20 bp, Homo sapiens
cctattaatctgtgccacgt

SEQ ID NO: 83472 - DNA, 20 bp, Homo sapiens
tggttaaaaaatgtcttgga

SEQ ID NO: 83473 - DNA, 18 bp, Homo sapiens
agaaacaaaccactgaga

SEQ ID NO: 83474 - DNA, 22 bp, Homo sapiens
agtttttggtgtccattacttc

SEQ ID NO: 83475 - DNA, 16 bp, Homo sapiens
gcactccagcccgggt

SEQ ID NO: 83476 - DNA, 16 bp, Homo sapiens
tgctgcctctgaggtg

SEQ ID NO: 83477 - DNA, 18 bp, Homo sapiens
caccatcaatttgaagca

SEQ ID NO: 83478 - DNA, 21 bp, Homo sapiens
accctgcagttagttggcact

SEQ ID NO: 83479 - DNA, 21 bp, Homo sapiens
tcagagtatttctgtaatact

SEQ ID NO: 83480 - DNA, 22 bp, Homo sapiens
cagtgggttttctatgggtgat

SEQ ID NO: 83481 - DNA, 20 bp, Homo sapiens
cgcttcacattaaacaggct

SEQ ID NO: 83482 - DNA, 20 bp, Homo sapiens
tctgatcctgaggttttgct

SEQ ID NO: 83483 - DNA, 18 bp, Homo sapiens
aggtgtaggaagcattca

SEQ ID NO: 83484 - DNA, 24 bp, Homo sapiens
aaatatggtgcggaagtgatttca

SEQ ID NO: 83485 - DNA, 18 bp, Homo sapiens
actagtgtcctctcagag

SEQ ID NO: 83486 - DNA, 21 bp, Homo sapiens
ggggctttgtgcagtaaaaaa

SEQ ID NO: 83487 - DNA, 16 bp, Homo sapiens
tgctgctggacaggct

SEQ ID NO: 83488 - DNA, 24 bp, Homo sapiens
tggcagggaagcagctaggtatct

SEQ ID NO: 83489 - DNA, 17 bp, Homo sapiens
caaagtagtgggaagat

SEQ ID NO: 83490 - DNA, 18 bp, Homo sapiens
aaaacacgtggaccagtg

SEQ ID NO: 83491 - DNA, 16 bp, Homo sapiens
cctttgggaggctggc

SEQ ID NO: 83492 - DNA, 18 bp, Homo sapiens
gttccccagggataagcc

SEQ ID NO: 83493 - DNA, 22 bp, Homo sapiens
ttgaaaaagatgtcacaaaaca

SEQ ID NO: 83494 - DNA, 22 bp, Homo sapiens
ctgaggagctcgacgaggaaat

SEQ ID NO: 83495 - DNA, 16 bp, Homo sapiens
caaagcaaggcagagc

SEQ ID NO: 83496 - DNA, 16 bp, Homo sapiens
ggaaaaagatgccagc

SEQ ID NO: 83497 - DNA, 19 bp, Homo sapiens
tgtcactccattaacaact

SEQ ID NO: 83498 - DNA, 19 bp, Homo sapiens
gtggttccaaggcaaaggg

SEQ ID NO: 83499 - DNA, 16 bp, Homo sapiens
accttacctagggggc

SEQ ID NO: 83500 - DNA, 17 bp, Homo sapiens
ggatccaatgatgctgg

SEQ ID NO: 83501 - DNA, 20 bp, Homo sapiens
ggaagtggtattgtagctct

SEQ ID NO: 83502 - DNA, 18 bp, Homo sapiens
gtggagccataatcccca

SEQ ID NO: 83503 - DNA, 23 bp, Homo sapiens
attttgatttttttctttgtcac

SEQ ID NO: 83504 - DNA, 19 bp, Homo sapiens
ggttgttatgagaatgcat

SEQ ID NO: 83505 - DNA, 18 bp, Homo sapiens
ccaaaacgaaatcctcca

SEQ ID NO: 83506 - DNA, 17 bp, Homo sapiens
agtcacagatggtcaga

SEQ ID NO: 83507 - DNA, 19 bp, Homo sapiens
gcgacatcaggagccaata

SEQ ID NO: 83508 - DNA, 28 bp, Homo sapiens
agcatttatttaaatattaatagagacg

SEQ ID NO: 83509 - DNA, 19 bp, Homo sapiens
ccgtttcttaagccttcat

SEQ ID NO: 83510 - DNA, 24 bp, Homo sapiens
attcccaggctctctgccccctca

SEQ ID NO: 83511 - DNA, 19 bp, Homo sapiens
ctgtgcaccctcgctgcca

SEQ ID NO: 83512 - DNA, 24 bp, Homo sapiens
caaagctttattcaacaggcgtgg

SEQ ID NO: 83513 - DNA, 18 bp, Homo sapiens
gagctgtggcacgagatc

SEQ ID NO: 83514 - DNA, 24 bp, Homo sapiens
tggccacagcggcacctcggccag

SEQ ID NO: 83515 - DNA, 24 bp, Homo sapiens
gcttcctagggagaagagctcacc

SEQ ID NO: 83516 - DNA, 19 bp, Homo sapiens
cttggttgaggcaggcgtg

SEQ ID NO: 83517 - DNA, 22 bp, Homo sapiens
gaggagacccgcgccgccctgg

SEQ ID NO: 83518 - DNA, 17 bp, Homo sapiens
caccaagagtccattga

SEQ ID NO: 83519 - DNA, 18 bp, Homo sapiens
catgtgcacagaatcgcc

SEQ ID NO: 83520 - DNA, 24 bp, Homo sapiens
gtgctgacagagggcgggcggggt

SEQ ID NO: 83521 - DNA, 17 bp, Homo sapiens
taggctggtggagtgtg

SEQ ID NO: 83522 - DNA, 24 bp, Homo sapiens
tacctaggcagccactcctccagg

SEQ ID NO: 83523 - DNA, 21 bp, Homo sapiens
ccaatgtctaactggagggcc

SEQ ID NO: 83524 - DNA, 24 bp, Homo sapiens
ttggtccacctcagcctgttggcg

SEQ ID NO: 83525 - DNA, 22 bp, Homo sapiens
cagcacctcaggggcagccaag

SEQ ID NO: 83526 - DNA, 23 bp, Homo sapiens
acctgtctctgagtggggctggc

SEQ ID NO: 83527 - DNA, 22 bp, Homo sapiens
ttgggcccaagatggcacacct

SEQ ID NO: 83528 - DNA, 24 bp, Homo sapiens
ggctgggtggaggaccagcatgct

SEQ ID NO: 83529 - DNA, 21 bp, Homo sapiens
gcagcactacggtggggacat

SEQ ID NO: 83530 - DNA, 24 bp, Homo sapiens
aagagcagccagtgggctggagcc

SEQ ID NO: 83531 - DNA, 16 bp, Homo sapiens
cctgtctttcagagca

SEQ ID NO: 83532 - DNA, 24 bp, Homo sapiens
gtgccccaggccacagccatagcc

SEQ ID NO: 83533 - DNA, 21 bp, Homo sapiens
gtctcctgggggctgcatcct

SEQ ID NO: 83534 - DNA, 23 bp, Homo sapiens
gccaccagctcggccacagaggc

SEQ ID NO: 83535 - DNA, 21 bp, Homo sapiens
ctggggggcgggggctgagct

SEQ ID NO: 83536 - DNA, 22 bp, Homo sapiens
gtctgcttgatgtatttcacct

SEQ ID NO: 83537 - DNA, 24 bp, Homo sapiens
atgccacgctgggcaagctcatct

SEQ ID NO: 83538 - DNA, 22 bp, Homo sapiens
gggaccccccgagcctgagatg

SEQ ID NO: 83539 - DNA, 18 bp, Homo sapiens
atgcagcgactgcgggcg

SEQ ID NO: 83540 - DNA, 20 bp, Homo sapiens
cttctgaggtctctctcagg

SEQ ID NO: 83541 - DNA, 22 bp, Homo sapiens
taccaggtgctgctgtcactga

SEQ ID NO: 83542 - DNA, 22 bp, Homo sapiens
ctccagaaaccgacggggtaga

SEQ ID NO: 83543 - DNA, 16 bp, Homo sapiens
gaatcacccaggaccc

SEQ ID NO: 83544 - DNA, 24 bp, Homo sapiens
atgctgtccaccgtcaggccccgc

SEQ ID NO: 83545 - DNA, 24 bp, Homo sapiens
atgcctcaagtgtggcccagggca

SEQ ID NO: 83546 - DNA, 23 bp, Homo sapiens
ctttggtttggctggagagcatc

SEQ ID NO: 83547 - DNA, 20 bp, Homo sapiens
agatgaccaaacatacccaa

SEQ ID NO: 83548 - DNA, 16 bp, Homo sapiens
gtgatgcaggcgatgc

SEQ ID NO: 83549 - DNA, 22 bp, Homo sapiens
aacaaaaaggatgcacctgtgg

SEQ ID NO: 83550 - DNA, 22 bp, Homo sapiens
caggggagggtgccagccaaaa

SEQ ID NO: 83551 - DNA, 19 bp, Homo sapiens
gtctgggagccccaggact

SEQ ID NO: 83552 - DNA, 24 bp, Homo sapiens
taagatggggggtcatctgggcag

SEQ ID NO: 83553 - DNA, 16 bp, Homo sapiens
gcctatgagggctcgg

SEQ ID NO: 83554 - DNA, 24 bp, Homo sapiens
atagcagtgctcagtccccagatg

SEQ ID NO: 83555 - DNA, 16 bp, Homo sapiens
gaagcgaggaaaagcc

SEQ ID NO: 83556 - DNA, 24 bp, Homo sapiens
gatgttgaccagctgttgctgcca

SEQ ID NO: 83557 - DNA, 17 bp, Homo sapiens
gatggcacccctaccct

SEQ ID NO: 83558 - DNA, 16 bp, Homo sapiens
tttctcactgtccgag

SEQ ID NO: 83559 - DNA, 21 bp, Homo sapiens
aagtgtattagatgatggaca

SEQ ID NO: 83560 - DNA, 19 bp, Homo sapiens
gacgcttcacggggctgtg

SEQ ID NO: 83561 - DNA, 23 bp, Homo sapiens
ttgggaaaaaggcgcaaggtggg

SEQ ID NO: 83562 - DNA, 23 bp, Homo sapiens
ggccgcgggggtgtagggaggag

SEQ ID NO: 83563 - DNA, 24 bp, Homo sapiens
ctgccgggtttgcagcccctgccc

SEQ ID NO: 83564 - DNA, 21 bp, Homo sapiens
atgaccgccttgagcgcgagg

SEQ ID NO: 83565 - DNA, 23 bp, Homo sapiens
gcagcccctatcccgcctcctcc

SEQ ID NO: 83566 - DNA, 24 bp, Homo sapiens
ttgcatcacgtgacggggccgcat

SEQ ID NO: 83567 - DNA, 24 bp, Homo sapiens
cctctcttctccggagaggcccgg

SEQ ID NO: 83568 - DNA, 16 bp, Homo sapiens
cttgctgggagttgta

SEQ ID NO: 83569 - DNA, 24 bp, Homo sapiens
gggtcccaggctccggctccgggt

SEQ ID NO: 83570 - DNA, 23 bp, Homo sapiens
gacgccgccggaagcgcgacccg

SEQ ID NO: 83571 - DNA, 24 bp, Homo sapiens
ggagccccgacgtttgccgtctct

SEQ ID NO: 83572 - DNA, 24 bp, Homo sapiens
gcagtgtccgggtcccgggccctc

SEQ ID NO: 83573 - DNA, 16 bp, Homo sapiens
ccccgcccgactcagt

SEQ ID NO: 83574 - DNA, 18 bp, Homo sapiens
agttttaagtcatggcgg

SEQ ID NO: 83575 - DNA, 24 bp, Homo sapiens
caggcacctaggaaagcccgggag

SEQ ID NO: 83576 - DNA, 17 bp, Homo sapiens
gggctgtagttgagttc

SEQ ID NO: 83577 - DNA, 16 bp, Homo sapiens
ctccttcaagcctgaa

SEQ ID NO: 83578 - DNA, 22 bp, Homo sapiens
cagggtcctgacggctggaggt

SEQ ID NO: 83579 - DNA, 24 bp, Homo sapiens
ctccgtctgtttaccctctgcaga

SEQ ID NO: 83580 - DNA, 17 bp, Homo sapiens
ccattcctgtttcgttt

SEQ ID NO: 83581 - DNA, 16 bp, Homo sapiens
aagacacaggtagctc

SEQ ID NO: 83582 - DNA, 22 bp, Homo sapiens
catggccaaaccaacaagcaaa

SEQ ID NO: 83583 - DNA, 16 bp, Homo sapiens
acagaacctggtgcaa

SEQ ID NO: 83584 - DNA, 21 bp, Homo sapiens
gggaacaccgaggccaaatcc

SEQ ID NO: 83585 - DNA, 16 bp, Homo sapiens
catgtcggcctccaag

SEQ ID NO: 83586 - DNA, 22 bp, Homo sapiens
accgcggaaatactgagagtga

SEQ ID NO: 83587 - DNA, 16 bp, Homo sapiens
cggatgcgattgttga

SEQ ID NO: 83588 - DNA, 24 bp, Homo sapiens
gaaagatctgttttaagtctctag

SEQ ID NO: 83589 - DNA, 19 bp, Homo sapiens
gataaacctacctcttcaa

SEQ ID NO: 83590 - DNA, 19 bp, Homo sapiens
cttgcagttaaggagaccg

SEQ ID NO: 83591 - DNA, 16 bp, Homo sapiens
aaagcaaactcaggct

SEQ ID NO: 83592 - DNA, 22 bp, Homo sapiens
ccaggaactgagcatggaatgt

SEQ ID NO: 83593 - DNA, 22 bp, Homo sapiens
aaaaaaaaaaaaaaaaaaagtg

SEQ ID NO: 83594 - DNA, 22 bp, Homo sapiens
tgtgaagtcgcaaaaaccaaga

SEQ ID NO: 83595 - DNA, 19 bp, Homo sapiens
ctgcaacagatccgcgacc

SEQ ID NO: 83596 - DNA, 24 bp, Homo sapiens
ggggctctcagtcacaagcccccg

SEQ ID NO: 83597 - DNA, 24 bp, Homo sapiens
cctgcacgatggccttcagcagag

SEQ ID NO: 83598 - DNA, 24 bp, Homo sapiens
agttgccggggccagggttcttgg

SEQ ID NO: 83599 - DNA, 21 bp, Homo sapiens
caggacagtcagtgggcagcc

SEQ ID NO: 83600 - DNA, 24 bp, Homo sapiens
gcagtggaagcactctggaaggcg

SEQ ID NO: 83601 - DNA, 17 bp, Homo sapiens
accctgtgcccagcaac

SEQ ID NO: 83602 - DNA, 24 bp, Homo sapiens
aggcccggcacgcggtgctggctc

SEQ ID NO: 83603 - DNA, 22 bp, Homo sapiens
acacagacctcatgacaccagg

SEQ ID NO: 83604 - DNA, 24 bp, Homo sapiens
gccccctgccctgtacaatgctga

SEQ ID NO: 83605 - DNA, 21 bp, Homo sapiens
ccttgatgaccttaaagaaga

SEQ ID NO: 83606 - DNA, 22 bp, Homo sapiens
aaggagaggggtccagggctgg

SEQ ID NO: 83607 - DNA, 21 bp, Homo sapiens
attgtctgtgagggccttgaa

SEQ ID NO: 83608 - DNA, 20 bp, Homo sapiens
cagccgtgtgggcgacgctg

SEQ ID NO: 83609 - DNA, 17 bp, Homo sapiens
tccaacccaaggtggca

SEQ ID NO: 83610 - DNA, 20 bp, Homo sapiens
tttgggggtcctcagagccc

SEQ ID NO: 83611 - DNA, 16 bp, Homo sapiens
agccccaggtccttcc

SEQ ID NO: 83612 - DNA, 23 bp, Homo sapiens
gaagaccttcacgaaaggctgga

SEQ ID NO: 83613 - DNA, 16 bp, Homo sapiens
caggtgcatgaagcag

SEQ ID NO: 83614 - DNA, 24 bp, Homo sapiens
tacttggaggaagagctgggtggg

SEQ ID NO: 83615 - DNA, 20 bp, Homo sapiens
ctcccctgagcctcttcggg

SEQ ID NO: 83616 - DNA, 18 bp, Homo sapiens
gaggacaagccaacatcc

SEQ ID NO: 83617 - DNA, 16 bp, Homo sapiens
gatggggtttctggca

SEQ ID NO: 83618 - DNA, 16 bp, Homo sapiens
ctcgtcgaggtaacag

SEQ ID NO: 83619 - DNA, 18 bp, Homo sapiens
gggagatgtagattcggc

SEQ ID NO: 83620 - DNA, 23 bp, Homo sapiens
ctgaacttaggaccattatcaga

SEQ ID NO: 83621 - DNA, 19 bp, Homo sapiens
actttgtcctgcagtggat

SEQ ID NO: 83622 - DNA, 22 bp, Homo sapiens
agccattgtgcccagcccaacc

SEQ ID NO: 83623 - DNA, 22 bp, Homo sapiens
ccgagagcagtggctggcgcac

SEQ ID NO: 83624 - DNA, 23 bp, Homo sapiens
actgacctctatgtccacagagg

SEQ ID NO: 83625 - DNA, 24 bp, Homo sapiens
gggaggatgagccatgcgtgttat

SEQ ID NO: 83626 - DNA, 16 bp, Homo sapiens
ccccagcctcccagaa

SEQ ID NO: 83627 - DNA, 23 bp, Homo sapiens
tggctcggccatccaggcagtgc

SEQ ID NO: 83628 - DNA, 23 bp, Homo sapiens
ctcagagagaccgagcagcttgc

SEQ ID NO: 83629 - DNA, 21 bp, Homo sapiens
tgtgcgtccggaccgcgtcct

SEQ ID NO: 83630 - DNA, 16 bp, Homo sapiens
agcacctgcagggaga

SEQ ID NO: 83631 - DNA, 24 bp, Homo sapiens
tgtggcttggagagagggtgccat

SEQ ID NO: 83632 - DNA, 23 bp, Homo sapiens
tgcgacagagggtaacgatgaac

SEQ ID NO: 83633 - DNA, 23 bp, Homo sapiens
gaaggaagcctgggtgtcctctc

SEQ ID NO: 83634 - DNA, 21 bp, Homo sapiens
gtttcagaaaccccaccttcc

SEQ ID NO: 83635 - DNA, 20 bp, Homo sapiens
gtctccctctccaccaggtc

SEQ ID NO: 83636 - DNA, 24 bp, Homo sapiens
agacaaccattcatgggagacagg

SEQ ID NO: 83637 - DNA, 24 bp, Homo sapiens
ctgcctgccggctgagagcctccc

SEQ ID NO: 83638 - DNA, 22 bp, Homo sapiens
aaaatgacactggccgtccctc

SEQ ID NO: 83639 - DNA, 24 bp, Homo sapiens
tcaaggagctctgcgagccttgct

SEQ ID NO: 83640 - DNA, 18 bp, Homo sapiens
cgctgtggcccaggtggg

SEQ ID NO: 83641 - DNA, 23 bp, Homo sapiens
cgagctggccggaccttgggtgg

SEQ ID NO: 83642 - DNA, 16 bp, Homo sapiens
gcgccccacccaccac

SEQ ID NO: 83643 - DNA, 23 bp, Homo sapiens
gactggggctgggggcagggctt

SEQ ID NO: 83644 - DNA, 23 bp, Homo sapiens
tctaagccagtgtgtgcttggca

SEQ ID NO: 83645 - DNA, 24 bp, Homo sapiens
gcagctgatgcggaacctccttgg

SEQ ID NO: 83646 - DNA, 16 bp, Homo sapiens
ctcgctctagtggcag

SEQ ID NO: 83647 - DNA, 24 bp, Homo sapiens
ctgctggcctctgttccctgccct

SEQ ID NO: 83648 - DNA, 22 bp, Homo sapiens
ccagagagccatgcccacaaaa

SEQ ID NO: 83649 - DNA, 19 bp, Homo sapiens
ggctgctgcaggagcctcg

SEQ ID NO: 83650 - DNA, 23 bp, Homo sapiens
ggtaaaatgatggcaacacagat

SEQ ID NO: 83651 - DNA, 19 bp, Homo sapiens
gctcacattccgtctctct

SEQ ID NO: 83652 - DNA, 16 bp, Homo sapiens
gaggggagctctcccg

SEQ ID NO: 83653 - DNA, 24 bp, Homo sapiens
cctgctgagaggagccgtgttttt

SEQ ID NO: 83654 - DNA, 23 bp, Homo sapiens
gaaaggcctagaaatgccaccgc

SEQ ID NO: 83655 - DNA, 24 bp, Homo sapiens
attctctcaggaactcgccgacat

SEQ ID NO: 83656 - DNA, 24 bp, Homo sapiens
tgactgtgctggagcatgtagaaa

SEQ ID NO: 83657 - DNA, 20 bp, Homo sapiens
ggacgatctcataggacacc

SEQ ID NO: 83658 - DNA, 21 bp, Homo sapiens
gataaacgtgtggtgggcact

SEQ ID NO: 83659 - DNA, 24 bp, Homo sapiens
aatgtcccacgccaccacctggag

SEQ ID NO: 83660 - DNA, 16 bp, Homo sapiens
ccacagcaagcaagca

SEQ ID NO: 83661 - DNA, 20 bp, Homo sapiens
ctgcccccaccccacctgga

SEQ ID NO: 83662 - DNA, 19 bp, Homo sapiens
catggcatgtccgaacgag

SEQ ID NO: 83663 - DNA, 19 bp, Homo sapiens
aaggtaccatcttctgagt

SEQ ID NO: 83664 - DNA, 20 bp, Homo sapiens
caagaagtataggaaggagc

SEQ ID NO: 83665 - DNA, 21 bp, Homo sapiens
cgaatcaccagagaacacggt

SEQ ID NO: 83666 - DNA, 24 bp, Homo sapiens
catcatcgaacggctccttcagca

SEQ ID NO: 83667 - DNA, 16 bp, Homo sapiens
cagagggctgggggcg

SEQ ID NO: 83668 - DNA, 16 bp, Homo sapiens
ctccaccgtggtcaac

SEQ ID NO: 83669 - DNA, 16 bp, Homo sapiens
ctccatgcggtgggtg

SEQ ID NO: 83670 - DNA, 22 bp, Homo sapiens
cacatctctccaccagttcaaa

SEQ ID NO: 83671 - DNA, 24 bp, Homo sapiens
gagtggaagtcagcctgtgtcatc

SEQ ID NO: 83672 - DNA, 16 bp, Homo sapiens
cagccaaagcccaaag

SEQ ID NO: 83673 - DNA, 16 bp, Homo sapiens
gtccatgacctgttga

SEQ ID NO: 83674 - DNA, 21 bp, Homo sapiens
cacctggcccttggcttctga

SEQ ID NO: 83675 - DNA, 20 bp, Homo sapiens
cacgggtctcaggagagata

SEQ ID NO: 83676 - DNA, 17 bp, Homo sapiens
aacacgtgctgtgcctg

SEQ ID NO: 83677 - DNA, 22 bp, Homo sapiens
ggactgcgctctataggagatc

SEQ ID NO: 83678 - DNA, 23 bp, Homo sapiens
tgggctgcaggctgtgaggcggc

SEQ ID NO: 83679 - DNA, 23 bp, Homo sapiens
agaatctctccatcagcgcctgc

SEQ ID NO: 83680 - DNA, 17 bp, Homo sapiens
ccagtgtggagaaggag

SEQ ID NO: 83681 - DNA, 23 bp, Homo sapiens
gacagagacagggccaggctcca

SEQ ID NO: 83682 - DNA, 24 bp, Homo sapiens
caggagtcctccctcctgaacctg

SEQ ID NO: 83683 - DNA, 18 bp, Homo sapiens
gaggggagggccctgctc

SEQ ID NO: 83684 - DNA, 24 bp, Homo sapiens
gacggctggattcagaacctgcag

SEQ ID NO: 83685 - DNA, 18 bp, Homo sapiens
cctgctggactggaaagc

SEQ ID NO: 83686 - DNA, 17 bp, Homo sapiens
cacgtccagcaccttga

SEQ ID NO: 83687 - DNA, 21 bp, Homo sapiens
tgtgtgcctggccgcgggagg

SEQ ID NO: 83688 - DNA, 16 bp, Homo sapiens
gcctggacacgcacct

SEQ ID NO: 83689 - DNA, 21 bp, Homo sapiens
ggctggtgtggggctgtggcc

SEQ ID NO: 83690 - DNA, 16 bp, Homo sapiens
acgtgcacaacagaga

SEQ ID NO: 83691 - DNA, 18 bp, Homo sapiens
gagtcccgaggcgccgtg

SEQ ID NO: 83692 - DNA, 23 bp, Homo sapiens
acagaccacgctgggggctgcag

SEQ ID NO: 83693 - DNA, 22 bp, Homo sapiens
ctcatcaacaggcagttctatg

SEQ ID NO: 83694 - DNA, 19 bp, Homo sapiens
ggccccggggtctctgagt

SEQ ID NO: 83695 - DNA, 24 bp, Homo sapiens
atgtgggagagctgcgagatgacc

SEQ ID NO: 83696 - DNA, 16 bp, Homo sapiens
tgaagtcccgagggac

SEQ ID NO: 83697 - DNA, 22 bp, Homo sapiens
gccaggtccaccagcaactggg

SEQ ID NO: 83698 - DNA, 23 bp, Homo sapiens
gtgtcacgagatgtggccctcgt

SEQ ID NO: 83699 - DNA, 20 bp, Homo sapiens
tctcaccttctcgatgatgt

SEQ ID NO: 83700 - DNA, 24 bp, Homo sapiens
aggagctgattaactcagtggtca

SEQ ID NO: 83701 - DNA, 16 bp, Homo sapiens
gaggccattgctgccc

SEQ ID NO: 83702 - DNA, 21 bp, Homo sapiens
aggtccgaaagctggccaccc

SEQ ID NO: 83703 - DNA, 24 bp, Homo sapiens
cagggaggggagcctcacctacgg

SEQ ID NO: 83704 - DNA, 24 bp, Homo sapiens
caccacttcaacagcctgctggac

SEQ ID NO: 83705 - DNA, 23 bp, Homo sapiens
ttgtagtgagctgagattgtgcc

SEQ ID NO: 83706 - DNA, 16 bp, Homo sapiens
gccacatccctttctt

SEQ ID NO: 83707 - DNA, 23 bp, Homo sapiens
aaaaaaaaaaaaaaaaaaggtgt

SEQ ID NO: 83708 - DNA, 16 bp, Homo sapiens
atgaccagaagcccca

SEQ ID NO: 83709 - DNA, 16 bp, Homo sapiens
catgagcctgtgtgta

SEQ ID NO: 83710 - DNA, 19 bp, Homo sapiens
cagctggtggacgctagcc

SEQ ID NO: 83711 - DNA, 22 bp, Homo sapiens
ctccccacccccggagctggaa

SEQ ID NO: 83712 - DNA, 19 bp, Homo sapiens
caaatccagggagggtgtg

SEQ ID NO: 83713 - DNA, 24 bp, Homo sapiens
ggatgtgaagacagccgtcctggg

SEQ ID NO: 83714 - DNA, 24 bp, Homo sapiens
tacacacgcgtggcgtggcttgca

SEQ ID NO: 83715 - DNA, 24 bp, Homo sapiens
tgtgttttgaagcacgcactctag

SEQ ID NO: 83716 - DNA, 17 bp, Homo sapiens
agggtgtagctgtgctt

SEQ ID NO: 83717 - DNA, 16 bp, Homo sapiens
aggactgcgttttcac

SEQ ID NO: 83718 - DNA, 22 bp, Homo sapiens
gctgggcccccaggaactggct

SEQ ID NO: 83719 - DNA, 23 bp, Homo sapiens
tgcagaccaagctgtacaccctg

SEQ ID NO: 83720 - DNA, 20 bp, Homo sapiens
ctggggccgtctctgcagct

SEQ ID NO: 83721 - DNA, 23 bp, Homo sapiens
tcagccacattcagctccactac

SEQ ID NO: 83722 - DNA, 23 bp, Homo sapiens
caccaggactggggaggctgcgg

SEQ ID NO: 83723 - DNA, 16 bp, Homo sapiens
ctgtgtctgtgttggg

SEQ ID NO: 83724 - DNA, 18 bp, Homo sapiens
atccttgttgggcaggcc

SEQ ID NO: 83725 - DNA, 23 bp, Homo sapiens
ctgtggtgctggacgtgggtctg

SEQ ID NO: 83726 - DNA, 16 bp, Homo sapiens
gtcccgcgtacatgta

SEQ ID NO: 83727 - DNA, 24 bp, Homo sapiens
agcttggctctggctttcaccatc

SEQ ID NO: 83728 - DNA, 18 bp, Homo sapiens
gcaaacagcgccaccaca

SEQ ID NO: 83729 - DNA, 24 bp, Homo sapiens
ctgcgggccgactcactgcaccgc

SEQ ID NO: 83730 - DNA, 22 bp, Homo sapiens
aagtccccgcagcaggaacgga

SEQ ID NO: 83731 - DNA, 17 bp, Homo sapiens
actgcgtctgcgactac

SEQ ID NO: 83732 - DNA, 24 bp, Homo sapiens
gctggtcttcttctcagagcctct

SEQ ID NO: 83733 - DNA, 23 bp, Homo sapiens
cagggcgtcagaggcgctggggc

SEQ ID NO: 83734 - DNA, 22 bp, Homo sapiens
agccgcacggcggggcctgcag

SEQ ID NO: 83735 - DNA, 24 bp, Homo sapiens
cagggttgggaagagccaagtctg

SEQ ID NO: 83736 - DNA, 21 bp, Homo sapiens
tcacctgcttcaagcactgca

SEQ ID NO: 83737 - DNA, 23 bp, Homo sapiens
cttctgcagggagccagagagag

SEQ ID NO: 83738 - DNA, 22 bp, Homo sapiens
cagctccctgtcctcctggccc

SEQ ID NO: 83739 - DNA, 23 bp, Homo sapiens
cacagggcctcctggcccggcgc

SEQ ID NO: 83740 - DNA, 24 bp, Homo sapiens
ggctcagctctgagggagggctgc

SEQ ID NO: 83741 - DNA, 22 bp, Homo sapiens
ccctactccctgctcttccgcg

SEQ ID NO: 83742 - DNA, 22 bp, Homo sapiens
ccccgagcagctgcagggacag

SEQ ID NO: 83743 - DNA, 20 bp, Homo sapiens
cagggactcaggcagcctgc

SEQ ID NO: 83744 - DNA, 23 bp, Homo sapiens
ccatagcccttgacgctgtgcag

SEQ ID NO: 83745 - DNA, 16 bp, Homo sapiens
agagcacagctggtcc

SEQ ID NO: 83746 - DNA, 24 bp, Homo sapiens
tgtctctagggtccagaaggccct

SEQ ID NO: 83747 - DNA, 17 bp, Homo sapiens
aaaaaccctactgggtc

SEQ ID NO: 83748 - DNA, 24 bp, Homo sapiens
aaggtgctgaagctggttctgggc

SEQ ID NO: 83749 - DNA, 21 bp, Homo sapiens
ggaaatggagcccgagcccga

SEQ ID NO: 83750 - DNA, 23 bp, Homo sapiens
ctttacttccccttgcagtgtgg

SEQ ID NO: 83751 - DNA, 19 bp, Homo sapiens
caggggtccctccaccctg

SEQ ID NO: 83752 - DNA, 21 bp, Homo sapiens
aggcactcccaccactccgaa

SEQ ID NO: 83753 - DNA, 24 bp, Homo sapiens
gccttctggggcgcctcggagccg

SEQ ID NO: 83754 - DNA, 23 bp, Homo sapiens
ctccccagcccctttgccccctt

SEQ ID NO: 83755 - DNA, 23 bp, Homo sapiens
aagagattaatgctgtcagcact

SEQ ID NO: 83756 - DNA, 20 bp, Homo sapiens
taccccgtgacctggccgct

SEQ ID NO: 83757 - DNA, 23 bp, Homo sapiens
tcaagctcgcctgtcctgctctg

SEQ ID NO: 83758 - DNA, 24 bp, Homo sapiens
ttcaggcccaaagacactggagcg

SEQ ID NO: 83759 - DNA, 21 bp, Homo sapiens
cgtttatgagaaaaatgtggg

SEQ ID NO: 83760 - DNA, 22 bp, Homo sapiens
tgcacctggccgtggttccagt

SEQ ID NO: 83761 - DNA, 16 bp, Homo sapiens
tggcagccacccaggg

SEQ ID NO: 83762 - DNA, 17 bp, Homo sapiens
gtggatgaggccctgct

SEQ ID NO: 83763 - DNA, 20 bp, Homo sapiens
cattcagggacttgctaagc

SEQ ID NO: 83764 - DNA, 17 bp, Homo sapiens
gatgatgtcaggcatct

SEQ ID NO: 83765 - DNA, 22 bp, Homo sapiens
gtaggcgaggctgcctctgctg

SEQ ID NO: 83766 - DNA, 24 bp, Homo sapiens
ggccatgctggctgtggctgagat

SEQ ID NO: 83767 - DNA, 20 bp, Homo sapiens
gagatggtctactgcctgga

SEQ ID NO: 83768 - DNA, 18 bp, Homo sapiens
gtgcatgcgcaggcaggg

SEQ ID NO: 83769 - DNA, 23 bp, Homo sapiens
cgtggccttgtccatctgcagcg

SEQ ID NO: 83770 - DNA, 16 bp, Homo sapiens
gagtcctgagagaggg

SEQ ID NO: 83771 - DNA, 23 bp, Homo sapiens
ttctggtggtgaagctcacgcac

SEQ ID NO: 83772 - DNA, 16 bp, Homo sapiens
cgggcagagacgccca

SEQ ID NO: 83773 - DNA, 23 bp, Homo sapiens
agagttgaggccagggtcgggaa

SEQ ID NO: 83774 - DNA, 22 bp, Homo sapiens
gagatggcgaacacactggcat

SEQ ID NO: 83775 - DNA, 20 bp, Homo sapiens
accccatcgctgccgtgggc

SEQ ID NO: 83776 - DNA, 16 bp, Homo sapiens
ggaggcacagggcctg

SEQ ID NO: 83777 - DNA, 24 bp, Homo sapiens
ccccggctcccctgaccaccctct

SEQ ID NO: 83778 - DNA, 16 bp, Homo sapiens
caggccttggggacaa

SEQ ID NO: 83779 - DNA, 16 bp, Homo sapiens
gccgcggagcagtatg

SEQ ID NO: 83780 - DNA, 16 bp, Homo sapiens
tcctggcagcagggaa

SEQ ID NO: 83781 - DNA, 23 bp, Homo sapiens
tatgacgtgatgggccagacaca

SEQ ID NO: 83782 - DNA, 23 bp, Homo sapiens
ggccttgcggcagaaagccccgg

SEQ ID NO: 83783 - DNA, 17 bp, Homo sapiens
gtgatgaaagggacaaa

SEQ ID NO: 83784 - DNA, 24 bp, Homo sapiens
tgcacttcatgccctggggatgtt

SEQ ID NO: 83785 - DNA, 24 bp, Homo sapiens
gggcaaagcaagccctggcctacc

SEQ ID NO: 83786 - DNA, 23 bp, Homo sapiens
tctcaggtttaatcagtacatcg

SEQ ID NO: 83787 - DNA, 19 bp, Homo sapiens
aaacaccctcccactgccc

SEQ ID NO: 83788 - DNA, 24 bp, Homo sapiens
tcaggtgccgcctgcccttccgga

SEQ ID NO: 83789 - DNA, 16 bp, Homo sapiens
gcatcaaagccctgca

SEQ ID NO: 83790 - DNA, 18 bp, Homo sapiens
atcaaaagacaagaggac

SEQ ID NO: 83791 - DNA, 22 bp, Homo sapiens
ggagctgggtgccgccgccttg

SEQ ID NO: 83792 - DNA, 19 bp, Homo sapiens
ctcttgggtctctcgttga

SEQ ID NO: 83793 - DNA, 24 bp, Homo sapiens
caggcctggtgagggcctccagcc

SEQ ID NO: 83794 - DNA, 17 bp, Homo sapiens
cacagccccatgtcctt

SEQ ID NO: 83795 - DNA, 16 bp, Homo sapiens
ctgcggtccaatgtcc

SEQ ID NO: 83796 - DNA, 22 bp, Homo sapiens
tactccagggcacacaggaccc

SEQ ID NO: 83797 - DNA, 19 bp, Homo sapiens
gcccggagtactagtctca

SEQ ID NO: 83798 - DNA, 16 bp, Homo sapiens
caagccttgtttgggg

SEQ ID NO: 83799 - DNA, 16 bp, Homo sapiens
gatctctccatcctga

SEQ ID NO: 83800 - DNA, 22 bp, Homo sapiens
tgctgcggcaccggaaggcctc

SEQ ID NO: 83801 - DNA, 23 bp, Homo sapiens
cttgttctccccttcccgggagc

SEQ ID NO: 83802 - DNA, 22 bp, Homo sapiens
cagggtccgtgccccccacccg

SEQ ID NO: 83803 - DNA, 24 bp, Homo sapiens
tagtctgaggatagccagaccccc

SEQ ID NO: 83804 - DNA, 17 bp, Homo sapiens
atgcaagcagccccatg

SEQ ID NO: 83805 - DNA, 24 bp, Homo sapiens
agaattcaaggagagctctgcagc

SEQ ID NO: 83806 - DNA, 18 bp, Homo sapiens
ctttccacccctcgtcac

SEQ ID NO: 83807 - DNA, 20 bp, Homo sapiens
atgtggtccacgtgattctc

SEQ ID NO: 83808 - DNA, 22 bp, Homo sapiens
ttctcatctgcagaccccaagc

SEQ ID NO: 83809 - DNA, 24 bp, Homo sapiens
gggtctttccgagcgaggtcctca

SEQ ID NO: 83810 - DNA, 20 bp, Homo sapiens
cgtgagctccaggtggaggt

SEQ ID NO: 83811 - DNA, 22 bp, Homo sapiens
gtggctcggcccgccctacctg

SEQ ID NO: 83812 - DNA, 16 bp, Homo sapiens
gggacagccgtgaagt

SEQ ID NO: 83813 - DNA, 24 bp, Homo sapiens
caggatacagacgtccctcaccag

SEQ ID NO: 83814 - DNA, 17 bp, Homo sapiens
cagcttgcccgtggagc

SEQ ID NO: 83815 - DNA, 16 bp, Homo sapiens
gatagcctgaaaaacc

SEQ ID NO: 83816 - DNA, 22 bp, Homo sapiens
ttggtcctgccacccgctagga

SEQ ID NO: 83817 - DNA, 18 bp, Homo sapiens
gatacgtcttctccaact

SEQ ID NO: 83818 - DNA, 24 bp, Homo sapiens
aacgaccgggtcccggttcccacg

SEQ ID NO: 83819 - DNA, 23 bp, Homo sapiens
cagggctgggcgggcctgcggga

SEQ ID NO: 83820 - DNA, 23 bp, Homo sapiens
aaggtgcagtcacctcgactccg

SEQ ID NO: 83821 - DNA, 24 bp, Homo sapiens
tctaggtctcctgtgggcgagttc

SEQ ID NO: 83822 - DNA, 23 bp, Homo sapiens
acgtgggcctgggctcgggacag

SEQ ID NO: 83823 - DNA, 22 bp, Homo sapiens
aagcttgtcactgtgacgacaa

SEQ ID NO: 83824 - DNA, 21 bp, Homo sapiens
gctgagaagagaatcccacgc

SEQ ID NO: 83825 - DNA, 21 bp, Homo sapiens
tcgggggagctgcagtccggc

SEQ ID NO: 83826 - DNA, 17 bp, Homo sapiens
ctgggactccagcttgg

SEQ ID NO: 83827 - DNA, 23 bp, Homo sapiens
gcgcctgccagcctcgacaccgg

SEQ ID NO: 83828 - DNA, 23 bp, Homo sapiens
gggccaaggctcacccgacatgg

SEQ ID NO: 83829 - DNA, 22 bp, Homo sapiens
ctggggactaagtccaccctgt

SEQ ID NO: 83830 - DNA, 17 bp, Homo sapiens
gggaccagcagcaactg

SEQ ID NO: 83831 - DNA, 24 bp, Homo sapiens
catgtgagacagaccaaggaggcg

SEQ ID NO: 83832 - DNA, 16 bp, Homo sapiens
tgggccgggcctgaag

SEQ ID NO: 83833 - DNA, 22 bp, Homo sapiens
tcccgtggggcccgggatcggg

SEQ ID NO: 83834 - DNA, 22 bp, Homo sapiens
ctgggttcactgaggccagcac

SEQ ID NO: 83835 - DNA, 24 bp, Homo sapiens
ccaggaactgggaggccggcacgt

SEQ ID NO: 83836 - DNA, 22 bp, Homo sapiens
ctctggctgcctgtggcactag

SEQ ID NO: 83837 - DNA, 23 bp, Homo sapiens
cagctgaggccttctcaggtttc

SEQ ID NO: 83838 - DNA, 17 bp, Homo sapiens
tcaggtaagtggtggtc

SEQ ID NO: 83839 - DNA, 22 bp, Homo sapiens
gggtcagcaggggcacataggc

SEQ ID NO: 83840 - DNA, 24 bp, Homo sapiens
atggtcttcgagttggcgccctgg

SEQ ID NO: 83841 - DNA, 23 bp, Homo sapiens
caggccagccccgcccagtacct

SEQ ID NO: 83842 - DNA, 22 bp, Homo sapiens
ccaggaccacggactgcaccag

SEQ ID NO: 83843 - DNA, 24 bp, Homo sapiens
caagtctgcaatcgcccctgagtg

SEQ ID NO: 83844 - DNA, 22 bp, Homo sapiens
tgcaggagaagacgaacctggc

SEQ ID NO: 83845 - DNA, 24 bp, Homo sapiens
agagcaagactctgtctcaaaaaa

SEQ ID NO: 83846 - DNA, 24 bp, Homo sapiens
gagatcctggtccggaggcccaca

SEQ ID NO: 83847 - DNA, 23 bp, Homo sapiens
gtggccgtcagagcagcgctggc

SEQ ID NO: 83848 - DNA, 21 bp, Homo sapiens
tgttgttgatgtccgaggaga

SEQ ID NO: 83849 - DNA, 22 bp, Homo sapiens
gagggcaaaaccagggcccagg

SEQ ID NO: 83850 - DNA, 23 bp, Homo sapiens
tcccggtgctccttgaagcgctc

SEQ ID NO: 83851 - DNA, 16 bp, Homo sapiens
ctggcctcaggccaaa

SEQ ID NO: 83852 - DNA, 24 bp, Homo sapiens
cagaggagggggtttggccgtgct

SEQ ID NO: 83853 - DNA, 24 bp, Homo sapiens
gagcctggagaacccgctcagccc

SEQ ID NO: 83854 - DNA, 17 bp, Homo sapiens
cagagcccgtgccaagg

SEQ ID NO: 83855 - DNA, 23 bp, Homo sapiens
gtctaacgccctcatggcggctg

SEQ ID NO: 83856 - DNA, 24 bp, Homo sapiens
cagccgtgtgggcgccctcagcag

SEQ ID NO: 83857 - DNA, 24 bp, Homo sapiens
tgtacaagtcactgtcggtgccgg

SEQ ID NO: 83858 - DNA, 24 bp, Homo sapiens
cgggtcagcctcctcccaaacacc

SEQ ID NO: 83859 - DNA, 22 bp, Homo sapiens
tcctcaggtctgcccaagcagc

SEQ ID NO: 83860 - DNA, 24 bp, Homo sapiens
gaaacgctcctgtgcagctgtcct

SEQ ID NO: 83861 - DNA, 18 bp, Homo sapiens
tgccctctctcctctgca

SEQ ID NO: 83862 - DNA, 24 bp, Homo sapiens
gcagagtggcgctctgcagccaac

SEQ ID NO: 83863 - DNA, 24 bp, Homo sapiens
gtgtgtagcccctcctcctgctga

SEQ ID NO: 83864 - DNA, 22 bp, Homo sapiens
gcaatggaggcagacggaccat

SEQ ID NO: 83865 - DNA, 24 bp, Homo sapiens
ttctcctccctgtaccagtccagc

SEQ ID NO: 83866 - DNA, 19 bp, Homo sapiens
ccaaagacattctgcacag

SEQ ID NO: 83867 - DNA, 24 bp, Homo sapiens
aggccttcccagcgtcctccctgc

SEQ ID NO: 83868 - DNA, 22 bp, Homo sapiens
ccaccagcacaggaacctcgcc

SEQ ID NO: 83869 - DNA, 24 bp, Homo sapiens
ctcgcagggctgctgtccctctgg

SEQ ID NO: 83870 - DNA, 24 bp, Homo sapiens
ctgtaggcatccgtgcgcctgtcc

SEQ ID NO: 83871 - DNA, 21 bp, Homo sapiens
cagggcctggcccagccccac

SEQ ID NO: 83872 - DNA, 20 bp, Homo sapiens
cctaaggagccccccgaggt

SEQ ID NO: 83873 - DNA, 24 bp, Homo sapiens
cgtggtcatggaggagggaagtcc

SEQ ID NO: 83874 - DNA, 19 bp, Homo sapiens
aagttcagagccagttccc

SEQ ID NO: 83875 - DNA, 21 bp, Homo sapiens
ggaggacgttgaggcagcgct

SEQ ID NO: 83876 - DNA, 24 bp, Homo sapiens
gcccaggtggatggctgcaaagtg

SEQ ID NO: 83877 - DNA, 24 bp, Homo sapiens
tggcagtgctgctgcgtcaacggg

SEQ ID NO: 83878 - DNA, 24 bp, Homo sapiens
ctgccaaccagctcctccgcgtgg

SEQ ID NO: 83879 - DNA, 23 bp, Homo sapiens
tggccctgggatggaggacagat

SEQ ID NO: 83880 - DNA, 22 bp, Homo sapiens
gaaggagaggtccacagagggc

SEQ ID NO: 83881 - DNA, 16 bp, Homo sapiens
ctgacaggggttctct

SEQ ID NO: 83882 - DNA, 18 bp, Homo sapiens
agtctgcagctcgggaga

SEQ ID NO: 83883 - DNA, 24 bp, Homo sapiens
gccaggaggagaagtcgctccacg

SEQ ID NO: 83884 - DNA, 24 bp, Homo sapiens
ccttaacctcagggctcagccggc

SEQ ID NO: 83885 - DNA, 22 bp, Homo sapiens
agcgagtcgtctcctcggaggg

SEQ ID NO: 83886 - DNA, 23 bp, Homo sapiens
cttcgcccgaggccgaccaggca

SEQ ID NO: 83887 - DNA, 20 bp, Homo sapiens
ctgagcaagtccagctcctc

SEQ ID NO: 83888 - DNA, 22 bp, Homo sapiens
gccactgggcgagcggggggag

SEQ ID NO: 83889 - DNA, 20 bp, Homo sapiens
ctggggacaaggccgacgtg

SEQ ID NO: 83890 - DNA, 23 bp, Homo sapiens
tactctcttgcccctgcgtgatg

SEQ ID NO: 83891 - DNA, 23 bp, Homo sapiens
tcagggaccctggacggggaaag

SEQ ID NO: 83892 - DNA, 23 bp, Homo sapiens
atgcctggcactttctctgcatt

SEQ ID NO: 83893 - DNA, 23 bp, Homo sapiens
gcccgagggtcccttgccttcca

SEQ ID NO: 83894 - DNA, 24 bp, Homo sapiens
caggttcccgcaggagaggtgtca

SEQ ID NO: 83895 - DNA, 24 bp, Homo sapiens
aggttacaccatctccgactcggc

SEQ ID NO: 83896 - DNA, 21 bp, Homo sapiens
agccctagggcacaggcgagg

SEQ ID NO: 83897 - DNA, 24 bp, Homo sapiens
taaagagcagagccacagcctcca

SEQ ID NO: 83898 - DNA, 21 bp, Homo sapiens
ggaacacagagcctggccatc

SEQ ID NO: 83899 - DNA, 21 bp, Homo sapiens
aggccgagcgggctggggtgg

SEQ ID NO: 83900 - DNA, 24 bp, Homo sapiens
gcttgtttgactcgtcgccaaaga

SEQ ID NO: 83901 - DNA, 23 bp, Homo sapiens
ctgggagggcggtggagtgggag

SEQ ID NO: 83902 - DNA, 22 bp, Homo sapiens
acagctccagcggatgcaggag

SEQ ID NO: 83903 - DNA, 24 bp, Homo sapiens
ctgccctggccaggccctcacctg

SEQ ID NO: 83904 - DNA, 19 bp, Homo sapiens
ctgcaagcctgagctccca

SEQ ID NO: 83905 - DNA, 22 bp, Homo sapiens
ctgcagctctaccattccccct

SEQ ID NO: 83906 - DNA, 18 bp, Homo sapiens
caggaggccgccccaccc

SEQ ID NO: 83907 - DNA, 20 bp, Homo sapiens
accgctcaaaggactgtgac

SEQ ID NO: 83908 - DNA, 16 bp, Homo sapiens
cccagctctgctgctg

SEQ ID NO: 83909 - DNA, 18 bp, Homo sapiens
gacggcgatcttgtgggt

SEQ ID NO: 83910 - DNA, 24 bp, Homo sapiens
ctccctgtggcagcctgccgtgac

SEQ ID NO: 83911 - DNA, 24 bp, Homo sapiens
cagctggccctgtccaggcaccta

SEQ ID NO: 83912 - DNA, 21 bp, Homo sapiens
ctcaggcagggctctgtgtgc

SEQ ID NO: 83913 - DNA, 16 bp, Homo sapiens
gttgagctctgtgggg

SEQ ID NO: 83914 - DNA, 20 bp, Homo sapiens
gaccagatcccatcatacga

SEQ ID NO: 83915 - DNA, 21 bp, Homo sapiens
tcagagcagcacctggcacag

SEQ ID NO: 83916 - DNA, 24 bp, Homo sapiens
cccgatgtctggcctgggtggctg

SEQ ID NO: 83917 - DNA, 16 bp, Homo sapiens
tccgtgtacctgtagg

SEQ ID NO: 83918 - DNA, 23 bp, Homo sapiens
gagtggggctcccggcagagcct

SEQ ID NO: 83919 - DNA, 23 bp, Homo sapiens
caggcctcccaggtacaccttgt

SEQ ID NO: 83920 - DNA, 22 bp, Homo sapiens
gcccgggagtgatgccaccctg

SEQ ID NO: 83921 - DNA, 21 bp, Homo sapiens
ttgcatgatgtcatcgtgcca

SEQ ID NO: 83922 - DNA, 24 bp, Homo sapiens
atcctgtccaatgagcatggctcc

SEQ ID NO: 83923 - DNA, 16 bp, Homo sapiens
gagccgtgccctgagg

SEQ ID NO: 83924 - DNA, 23 bp, Homo sapiens
gctcatcgagctgaaggactgcc

SEQ ID NO: 83925 - DNA, 16 bp, Homo sapiens
ctggagcaggtggggg

SEQ ID NO: 83926 - DNA, 24 bp, Homo sapiens
tgaggacggccagttcacctactg

SEQ ID NO: 83927 - DNA, 23 bp, Homo sapiens
ccctgcccctggggagagccgag

SEQ ID NO: 83928 - DNA, 24 bp, Homo sapiens
cttcttgtcgcagcggtgcttgtc

SEQ ID NO: 83929 - DNA, 19 bp, Homo sapiens
cagagcccctggagtaatc

SEQ ID NO: 83930 - DNA, 22 bp, Homo sapiens
cttgaagtcctcaccggagtca

SEQ ID NO: 83931 - DNA, 22 bp, Homo sapiens
ctggccccacaaacccatccgg

SEQ ID NO: 83932 - DNA, 16 bp, Homo sapiens
cacctgcctggggccc

SEQ ID NO: 83933 - DNA, 24 bp, Homo sapiens
ccctgatgcccaccaaggacgtgg

SEQ ID NO: 83934 - DNA, 23 bp, Homo sapiens
ctgctcctcgtgaccgaagctca

SEQ ID NO: 83935 - DNA, 24 bp, Homo sapiens
aacgactttgtgtccattgtctac

SEQ ID NO: 83936 - DNA, 20 bp, Homo sapiens
acgcaggctcggggtgaagc

SEQ ID NO: 83937 - DNA, 22 bp, Homo sapiens
ggcttggcctgggggaggccag

SEQ ID NO: 83938 - DNA, 23 bp, Homo sapiens
tgcactcgtagtccagcggggtg

SEQ ID NO: 83939 - DNA, 19 bp, Homo sapiens
cagatgctgcccatggagc

SEQ ID NO: 83940 - DNA, 24 bp, Homo sapiens
ctgcactgcagggccccacccggc

SEQ ID NO: 83941 - DNA, 17 bp, Homo sapiens
cttcagcacacgctgtg

SEQ ID NO: 83942 - DNA, 19 bp, Homo sapiens
ccaggcccagggctcttgg

SEQ ID NO: 83943 - DNA, 23 bp, Homo sapiens
gccagttcaactttgtccacgtg

SEQ ID NO: 83944 - DNA, 21 bp, Homo sapiens
acgatcttggccacgctggtg

SEQ ID NO: 83945 - DNA, 23 bp, Homo sapiens
ccctgcagtgcaggaaaggtagg

SEQ ID NO: 83946 - DNA, 21 bp, Homo sapiens
cacccccactcacatttgcgt

SEQ ID NO: 83947 - DNA, 16 bp, Homo sapiens
ctgcagtgtggcgcca

SEQ ID NO: 83948 - DNA, 24 bp, Homo sapiens
cagggggtgagctcactatcaggt

SEQ ID NO: 83949 - DNA, 22 bp, Homo sapiens
acatggagggccttgtggacac

SEQ ID NO: 83950 - DNA, 21 bp, Homo sapiens
tcggtggggttggagcggcta

SEQ ID NO: 83951 - DNA, 21 bp, Homo sapiens
cttcgtggcccgccagatggc

SEQ ID NO: 83952 - DNA, 24 bp, Homo sapiens
cctacccgctggcggagccgcttg

SEQ ID NO: 83953 - DNA, 23 bp, Homo sapiens
ctggtgggacaggcccaggtgcc

SEQ ID NO: 83954 - DNA, 20 bp, Homo sapiens
cacccgccccacagcttggg

SEQ ID NO: 83955 - DNA, 24 bp, Homo sapiens
cagatggcctcacaggtgcatcat

SEQ ID NO: 83956 - DNA, 20 bp, Homo sapiens
ctgaaggcagaggcggcttg

SEQ ID NO: 83957 - DNA, 24 bp, Homo sapiens
ttgcccggctccgccacatcaagc

SEQ ID NO: 83958 - DNA, 21 bp, Homo sapiens
tatgggacggagggtgcacca

SEQ ID NO: 83959 - DNA, 24 bp, Homo sapiens
cagcggggtgtgctggctgcccaa

SEQ ID NO: 83960 - DNA, 16 bp, Homo sapiens
ctggcccacctcatag

SEQ ID NO: 83961 - DNA, 16 bp, Homo sapiens
cagacttactgcccaa

SEQ ID NO: 83962 - DNA, 18 bp, Homo sapiens
gagggagggccccggcct

SEQ ID NO: 83963 - DNA, 23 bp, Homo sapiens
tactccaaccccagcctacctct

SEQ ID NO: 83964 - DNA, 23 bp, Homo sapiens
gcactggggtcaggactttattt

SEQ ID NO: 83965 - DNA, 22 bp, Homo sapiens
ccagccgagcccacacctggct

SEQ ID NO: 83966 - DNA, 22 bp, Homo sapiens
accaagcagacaaagtcaataa

SEQ ID NO: 83967 - DNA, 24 bp, Homo sapiens
gaggacttcaccgagtttgtgtga

SEQ ID NO: 83968 - DNA, 18 bp, Homo sapiens
agtggtgctaccatcatt

SEQ ID NO: 83969 - DNA, 19 bp, Homo sapiens
gactctcatttgctggctg

SEQ ID NO: 83970 - DNA, 19 bp, Homo sapiens
gtgtcattcagatattctc

SEQ ID NO: 83971 - DNA, 18 bp, Homo sapiens
actgccctcctcccacct

SEQ ID NO: 83972 - DNA, 18 bp, Homo sapiens
tatccagaaaattgtgtt

SEQ ID NO: 83973 - DNA, 18 bp, Homo sapiens
tgcagcagcaatcttgac

SEQ ID NO: 83974 - DNA, 20 bp, Homo sapiens
atatttccatctttttgtcc

SEQ ID NO: 83975 - DNA, 21 bp, Homo sapiens
tctgaattatatcttctttgt

SEQ ID NO: 83976 - DNA, 16 bp, Homo sapiens
gttggtcagagacagg

SEQ ID NO: 83977 - DNA, 18 bp, Homo sapiens
ttgggaacatggttttga

SEQ ID NO: 83978 - DNA, 18 bp, Homo sapiens
ggcaattgttccagaagt

SEQ ID NO: 83979 - DNA, 18 bp, Homo sapiens
ctctaaggctacaaatgt

SEQ ID NO: 83980 - DNA, 24 bp, Homo sapiens
tttgactcaagtccactaatcttc

SEQ ID NO: 83981 - DNA, 16 bp, Homo sapiens
ctcagcgtgggtgtga

SEQ ID NO: 83982 - DNA, 18 bp, Homo sapiens
ttccattcttctaagtga

SEQ ID NO: 83983 - DNA, 19 bp, Homo sapiens
tgtgccaaagagagtgagt

SEQ ID NO: 83984 - DNA, 17 bp, Homo sapiens
tcagaatgtcccaccca

SEQ ID NO: 83985 - DNA, 21 bp, Homo sapiens
gggatatttatttttctccga

SEQ ID NO: 83986 - DNA, 19 bp, Homo sapiens
gaggaagacagtacagcat

SEQ ID NO: 83987 - DNA, 22 bp, Homo sapiens
taattgtttggtttttgtctct

SEQ ID NO: 83988 - DNA, 23 bp, Homo sapiens
aatgagctgaaacacagggcttc

SEQ ID NO: 83989 - DNA, 17 bp, Homo sapiens
caagccagtggttaaat

SEQ ID NO: 83990 - DNA, 19 bp, Homo sapiens
ataaagagaagcccctaat

SEQ ID NO: 83991 - DNA, 20 bp, Homo sapiens
ttttcatcctaaatttcaag

SEQ ID NO: 83992 - DNA, 18 bp, Homo sapiens
tgcacattgatgattctt

SEQ ID NO: 83993 - DNA, 16 bp, Homo sapiens
gggaaggtttgttcat

SEQ ID NO: 83994 - DNA, 24 bp, Homo sapiens
gtgatcagcttatttatttttgtt

SEQ ID NO: 83995 - DNA, 17 bp, Homo sapiens
acacacaaagtggtccc

SEQ ID NO: 83996 - DNA, 22 bp, Homo sapiens
taagacatgctatgatgaataa

SEQ ID NO: 83997 - DNA, 20 bp, Homo sapiens
tgtgacagactgaagcttgg

SEQ ID NO: 83998 - DNA, 20 bp, Homo sapiens
ttttacctaaatctatgact

SEQ ID NO: 83999 - DNA, 19 bp, Homo sapiens
aggaggagactctgtctca

SEQ ID NO: 84000 - DNA, 16 bp, Homo sapiens
agaagctctgcttggt

SEQ ID NO: 84001 - DNA, 19 bp, Homo sapiens
tgtttacacatactctctt

SEQ ID NO: 84002 - DNA, 19 bp, Homo sapiens
aaaaccaatttttgatgcc

SEQ ID NO: 84003 - DNA, 16 bp, Homo sapiens
actacagatgagggaa

SEQ ID NO: 84004 - DNA, 16 bp, Homo sapiens
gactgctttagtgcaa

SEQ ID NO: 84005 - DNA, 22 bp, Homo sapiens
atgttgttcataatagtagtac

SEQ ID NO: 84006 - DNA, 21 bp, Homo sapiens
ttttttttcctgatattaggt

SEQ ID NO: 84007 - DNA, 16 bp, Homo sapiens
agtctcctcagggggc

SEQ ID NO: 84008 - DNA, 28 bp, Homo sapiens
atattatgaaagtaatatatgttcattg

SEQ ID NO: 84009 - DNA, 21 bp, Homo sapiens
ccacctcactaacctgcttct

SEQ ID NO: 84010 - DNA, 18 bp, Homo sapiens
ggaccctttctgatcaac

SEQ ID NO: 84011 - DNA, 23 bp, Homo sapiens
ttacacccccagcacagaaaaac

SEQ ID NO: 84012 - DNA, 22 bp, Homo sapiens
tactgaagtctggaaatataaa

SEQ ID NO: 84013 - DNA, 25 bp, Homo sapiens
aaatcattcttcatctaatagttaa

SEQ ID NO: 84014 - DNA, 17 bp, Homo sapiens
tggcttagggcattgtt

SEQ ID NO: 84015 - DNA, 21 bp, Homo sapiens
gcaaacgtcatgacttctact

SEQ ID NO: 84016 - DNA, 19 bp, Homo sapiens
gtgaacctagtcctttaat

SEQ ID NO: 84017 - DNA, 16 bp, Homo sapiens
gtcaggccaagcacag

SEQ ID NO: 84018 - DNA, 16 bp, Homo sapiens
tgcactccagcctagg

SEQ ID NO: 84019 - DNA, 18 bp, Homo sapiens
atcatcagaggaacaaaa

SEQ ID NO: 84020 - DNA, 20 bp, Homo sapiens
tgtcattctattgatttttt

SEQ ID NO: 84021 - DNA, 17 bp, Homo sapiens
ttccagtgcctgatgtg

SEQ ID NO: 84022 - DNA, 18 bp, Homo sapiens
tcaagcctaggttattac

SEQ ID NO: 84023 - DNA, 20 bp, Homo sapiens
aatgaaacaaccaagcataa

SEQ ID NO: 84024 - DNA, 17 bp, Homo sapiens
acaaatcactccttggg

SEQ ID NO: 84025 - DNA, 19 bp, Homo sapiens
tgtacagtgagaatacaaa

SEQ ID NO: 84026 - DNA, 19 bp, Homo sapiens
aaagctacacacacgagat

SEQ ID NO: 84027 - DNA, 23 bp, Homo sapiens
ttatttagatttacagctaataa

SEQ ID NO: 84028 - DNA, 18 bp, Homo sapiens
ctggatgtttgaaacttt

SEQ ID NO: 84029 - DNA, 19 bp, Homo sapiens
ctctttggaaagctctgga

SEQ ID NO: 84030 - DNA, 18 bp, Homo sapiens
cttgcatggtcatagctc

SEQ ID NO: 84031 - DNA, 16 bp, Homo sapiens
gaaagagccggttgta

SEQ ID NO: 84032 - DNA, 19 bp, Homo sapiens
ctgcaaagatctctttcag

SEQ ID NO: 84033 - DNA, 16 bp, Homo sapiens
ttgccattgtgtcaga

SEQ ID NO: 84034 - DNA, 24 bp, Homo sapiens
taaagtttttcccactgccaagca

SEQ ID NO: 84035 - DNA, 23 bp, Homo sapiens
ttataattcatcactttgcatac

SEQ ID NO: 84036 - DNA, 17 bp, Homo sapiens
acatggctctttacaac

SEQ ID NO: 84037 - DNA, 20 bp, Homo sapiens
ctttcttttcacctgcataa

SEQ ID NO: 84038 - DNA, 20 bp, Homo sapiens
aggaacctgaaggattctga

SEQ ID NO: 84039 - DNA, 24 bp, Homo sapiens
taaatattgggaaaaataaccaat

SEQ ID NO: 84040 - DNA, 18 bp, Homo sapiens
tcctgcttctgatagcat

SEQ ID NO: 84041 - DNA, 24 bp, Homo sapiens
atatctttaatagtattaaagaac

SEQ ID NO: 84042 - DNA, 22 bp, Homo sapiens
ataaagtgtagactaatgatgt

SEQ ID NO: 84043 - DNA, 23 bp, Homo sapiens
aaagttttcatatgtaagacacg

SEQ ID NO: 84044 - DNA, 23 bp, Homo sapiens
aaataaagacaatacgaagtaga

SEQ ID NO: 84045 - DNA, 23 bp, Homo sapiens
ctgaaaccaattgtaggttgcct

SEQ ID NO: 84046 - DNA, 21 bp, Homo sapiens
tcctattctctttgttatcag

SEQ ID NO: 84047 - DNA, 16 bp, Homo sapiens
tgccaggagctgcata

SEQ ID NO: 84048 - DNA, 17 bp, Homo sapiens
aagaaacacgtcaaacc

SEQ ID NO: 84049 - DNA, 24 bp, Homo sapiens
tctgtcccgccaggaacacctcca

SEQ ID NO: 84050 - DNA, 22 bp, Homo sapiens
tgctgtttacattcactaaggc

SEQ ID NO: 84051 - DNA, 18 bp, Homo sapiens
caccctgcaagtgtcagg

SEQ ID NO: 84052 - DNA, 21 bp, Homo sapiens
gtacctgttcgacggaatgtt

SEQ ID NO: 84053 - DNA, 17 bp, Homo sapiens
ctgtcttgccagtgata

SEQ ID NO: 84054 - DNA, 22 bp, Homo sapiens
ttaaaagtgaatgactcaatgg

SEQ ID NO: 84055 - DNA, 24 bp, Homo sapiens
aaaagcatctacagaagttgctgg

SEQ ID NO: 84056 - DNA, 24 bp, Homo sapiens
aggtaggttgtccttgcctgcctg

SEQ ID NO: 84057 - DNA, 17 bp, Homo sapiens
tttccccatcttaggta

SEQ ID NO: 84058 - DNA, 21 bp, Homo sapiens
gcctgaactgtcgaattgttt

SEQ ID NO: 84059 - DNA, 16 bp, Homo sapiens
aaatacggttgcgcct

SEQ ID NO: 84060 - DNA, 21 bp, Homo sapiens
gttggggtgtgcagcaagttc

SEQ ID NO: 84061 - DNA, 17 bp, Homo sapiens
actcgcaaagccagcat

SEQ ID NO: 84062 - DNA, 19 bp, Homo sapiens
gagggccaaaggctggagt

SEQ ID NO: 84063 - DNA, 18 bp, Homo sapiens
acagaaatggaggactta

SEQ ID NO: 84064 - DNA, 21 bp, Homo sapiens
ggtaggcctgtcattatcatc

SEQ ID NO: 84065 - DNA, 17 bp, Homo sapiens
ttaaagagggaagctgt

SEQ ID NO: 84066 - DNA, 18 bp, Homo sapiens
agaaaggcccgtctttgt

SEQ ID NO: 84067 - DNA, 17 bp, Homo sapiens
agtcctgctcagaaaaa

SEQ ID NO: 84068 - DNA, 19 bp, Homo sapiens
agaacaataaggtcctctt

SEQ ID NO: 84069 - DNA, 19 bp, Homo sapiens
ctcagtatcacagactttc

SEQ ID NO: 84070 - DNA, 20 bp, Homo sapiens
cctctggaaaaatacagctt

SEQ ID NO: 84071 - DNA, 16 bp, Homo sapiens
cacggctccatttcat

SEQ ID NO: 84072 - DNA, 16 bp, Homo sapiens
agggctccactggttt

SEQ ID NO: 84073 - DNA, 18 bp, Homo sapiens
tcaaaaagaggattccct

SEQ ID NO: 84074 - DNA, 20 bp, Homo sapiens
agtcttcatcaggtaactga

SEQ ID NO: 84075 - DNA, 19 bp, Homo sapiens
ctgttttgttgggttttgt

SEQ ID NO: 84076 - DNA, 19 bp, Homo sapiens
aactcagcattccatccct

SEQ ID NO: 84077 - DNA, 20 bp, Homo sapiens
tgtttcttttaaatctagga

SEQ ID NO: 84078 - DNA, 19 bp, Homo sapiens
aagcactattactccaaga

SEQ ID NO: 84079 - DNA, 20 bp, Homo sapiens
gtttctttgataggacttca

SEQ ID NO: 84080 - DNA, 17 bp, Homo sapiens
tctgttcctcagcctcc

SEQ ID NO: 84081 - DNA, 16 bp, Homo sapiens
aagtcacctcacacaa

SEQ ID NO: 84082 - DNA, 22 bp, Homo sapiens
tggccctgtcactttttagaaa

SEQ ID NO: 84083 - DNA, 19 bp, Homo sapiens
tcagatcattgtgaaccac

SEQ ID NO: 84084 - DNA, 22 bp, Homo sapiens
ttcatcatcatcatcatcatca

SEQ ID NO: 84085 - DNA, 16 bp, Homo sapiens
cccaagcacctggtag

SEQ ID NO: 84086 - DNA, 19 bp, Homo sapiens
ttttcgtgctgatatttgt

SEQ ID NO: 84087 - DNA, 17 bp, Homo sapiens
taactaaagtcagctct

SEQ ID NO: 84088 - DNA, 21 bp, Homo sapiens
ggctagaagttggcaaaagtg

SEQ ID NO: 84089 - DNA, 19 bp, Homo sapiens
attaggatgtctggcacat

SEQ ID NO: 84090 - DNA, 20 bp, Homo sapiens
ttcctgtgtatcttctacca

SEQ ID NO: 84091 - DNA, 22 bp, Homo sapiens
aaaataaggatgcaagtaaaaa

SEQ ID NO: 84092 - DNA, 19 bp, Homo sapiens
atcttcagtgggcccagcg

SEQ ID NO: 84093 - DNA, 16 bp, Homo sapiens
ccgtggaggctgtcat

SEQ ID NO: 84094 - DNA, 22 bp, Homo sapiens
gttcttgaacttggttgtcctg

SEQ ID NO: 84095 - DNA, 17 bp, Homo sapiens
ctgtttcctgcagaata

SEQ ID NO: 84096 - DNA, 20 bp, Homo sapiens
cctcattggaaaggtttaaa

SEQ ID NO: 84097 - DNA, 16 bp, Homo sapiens
ggaagcaacctctcct

SEQ ID NO: 84098 - DNA, 16 bp, Homo sapiens
acatccaaatgactct

SEQ ID NO: 84099 - DNA, 19 bp, Homo sapiens
gcaggaatgaaaatcttca

SEQ ID NO: 84100 - DNA, 19 bp, Homo sapiens
catgcttcgtgttgttcta

SEQ ID NO: 84101 - DNA, 20 bp, Homo sapiens
accaaaacttaaaagaacaa

SEQ ID NO: 84102 - DNA, 18 bp, Homo sapiens
gaatgtttttctgcagaa

SEQ ID NO: 84103 - DNA, 21 bp, Homo sapiens
ggcaaatatttcatgttctct

SEQ ID NO: 84104 - DNA, 23 bp, Homo sapiens
gacttagaatctcactttcctga

SEQ ID NO: 84105 - DNA, 19 bp, Homo sapiens
cctccttgtaaataaagct

SEQ ID NO: 84106 - DNA, 19 bp, Homo sapiens
agatttctctgtttgattt

SEQ ID NO: 84107 - DNA, 17 bp, Homo sapiens
ttacttcacctgtaagt

SEQ ID NO: 84108 - DNA, 17 bp, Homo sapiens
aggtgagttcatttaga

SEQ ID NO: 84109 - DNA, 18 bp, Homo sapiens
cattcctcctaaaggtag

SEQ ID NO: 84110 - DNA, 21 bp, Homo sapiens
gtgggcagttggccactttta

SEQ ID NO: 84111 - DNA, 16 bp, Homo sapiens
agggcgactacagttc

SEQ ID NO: 84112 - DNA, 16 bp, Homo sapiens
ttttgccttgtgcctc

SEQ ID NO: 84113 - DNA, 16 bp, Homo sapiens
accaactgcccaacca

SEQ ID NO: 84114 - DNA, 17 bp, Homo sapiens
agtaagttcactgctac

SEQ ID NO: 84115 - DNA, 21 bp, Homo sapiens
tcttaaatctgaacttccaga

SEQ ID NO: 84116 - DNA, 22 bp, Homo sapiens
ctgatagagtctgtaaaggaac

SEQ ID NO: 84117 - DNA, 17 bp, Homo sapiens
gcaaaaatcctgctaga

SEQ ID NO: 84118 - DNA, 17 bp, Homo sapiens
caacacctttttctggt

SEQ ID NO: 84119 - DNA, 17 bp, Homo sapiens
ggcactgattcactcag

SEQ ID NO: 84120 - DNA, 18 bp, Homo sapiens
atttctgtaactggttct

SEQ ID NO: 84121 - DNA, 17 bp, Homo sapiens
agcagaagaaagaagca

SEQ ID NO: 84122 - DNA, 21 bp, Homo sapiens
ttatttcagttactggtgatc

SEQ ID NO: 84123 - DNA, 19 bp, Homo sapiens
acacccaagaacattttcc

SEQ ID NO: 84124 - DNA, 20 bp, Homo sapiens
tcttttcccagacaatctga

SEQ ID NO: 84125 - DNA, 23 bp, Homo sapiens
gggcctgagtcctttaaccctgg

SEQ ID NO: 84126 - DNA, 16 bp, Homo sapiens
tgtcctcttctgctgc

SEQ ID NO: 84127 - DNA, 18 bp, Homo sapiens
caaaacccatcttgatga

SEQ ID NO: 84128 - DNA, 17 bp, Homo sapiens
cactgaccctgtgggga

SEQ ID NO: 84129 - DNA, 19 bp, Homo sapiens
atacatttttttcctcctc

SEQ ID NO: 84130 - DNA, 16 bp, Homo sapiens
cctcctgggccatctc

SEQ ID NO: 84131 - DNA, 28 bp, Homo sapiens
agtagtatttatatataataggttaaaa

SEQ ID NO: 84132 - DNA, 18 bp, Homo sapiens
tctccagtttcttcatca

SEQ ID NO: 84133 - DNA, 18 bp, Homo sapiens
ttcatctgcctgaatgaa

SEQ ID NO: 84134 - DNA, 17 bp, Homo sapiens
acaaagagtgagactct

SEQ ID NO: 84135 - DNA, 17 bp, Homo sapiens
tgtttgtctcagcagga

SEQ ID NO: 84136 - DNA, 17 bp, Homo sapiens
gcgtctattgctagtca

SEQ ID NO: 84137 - DNA, 16 bp, Homo sapiens
ctagcgtgcccaaaga

SEQ ID NO: 84138 - DNA, 20 bp, Homo sapiens
atacctgggaaatgaataat

SEQ ID NO: 84139 - DNA, 17 bp, Homo sapiens
aaacagttcttgactct

SEQ ID NO: 84140 - DNA, 18 bp, Homo sapiens
gcggtgagagatcctgct

SEQ ID NO: 84141 - DNA, 17 bp, Homo sapiens
cgccttcaggtaagtga

SEQ ID NO: 84142 - DNA, 17 bp, Homo sapiens
tgcttaatcttttcagc

SEQ ID NO: 84143 - DNA, 18 bp, Homo sapiens
cttccagttaaaggagaa

SEQ ID NO: 84144 - DNA, 25 bp, Homo sapiens
agaaatacgttttctttaaagtttt

SEQ ID NO: 84145 - DNA, 17 bp, Homo sapiens
gcactgcatcccttccc

SEQ ID NO: 84146 - DNA, 21 bp, Homo sapiens
ataacaccttaatttgagaat

SEQ ID NO: 84147 - DNA, 18 bp, Homo sapiens
agtagattgttatggacc

SEQ ID NO: 84148 - DNA, 22 bp, Homo sapiens
cccttttcaagaatgctaattt

SEQ ID NO: 84149 - DNA, 21 bp, Homo sapiens
cgctatttccacattttcatt

SEQ ID NO: 84150 - DNA, 22 bp, Homo sapiens
ctgtcgcctgcccgatggacga

SEQ ID NO: 84151 - DNA, 22 bp, Homo sapiens
cagatgatactgctgccctcgg

SEQ ID NO: 84152 - DNA, 17 bp, Homo sapiens
ctgggtcccggtgtcgg

SEQ ID NO: 84153 - DNA, 24 bp, Homo sapiens
agcggggtcagagtcctgcgtccg

SEQ ID NO: 84154 - DNA, 22 bp, Homo sapiens
cgcactgagggtgcgatcccgg

SEQ ID NO: 84155 - DNA, 24 bp, Homo sapiens
tcctcacagctgaggggcttcccg

SEQ ID NO: 84156 - DNA, 24 bp, Homo sapiens
ccggggctcacctggctgcagcca

SEQ ID NO: 84157 - DNA, 16 bp, Homo sapiens
atccggggtacctgca

SEQ ID NO: 84158 - DNA, 24 bp, Homo sapiens
ctgtgagcttgcggaagtcagttc

SEQ ID NO: 84159 - DNA, 24 bp, Homo sapiens
ggagaggaaggggcgcagggctgg

SEQ ID NO: 84160 - DNA, 18 bp, Homo sapiens
gcctgccctcgctcggcg

SEQ ID NO: 84161 - DNA, 16 bp, Homo sapiens
cgctccgctcctcagg

SEQ ID NO: 84162 - DNA, 19 bp, Homo sapiens
ctgctgctgctgctgcagg

SEQ ID NO: 84163 - DNA, 24 bp, Homo sapiens
gggggagggtgacgtcgctgcccg

SEQ ID NO: 84164 - DNA, 24 bp, Homo sapiens
tgaacgtgtagctctcggcgtcaa

SEQ ID NO: 84165 - DNA, 24 bp, Homo sapiens
atcccgacgccgggagcgagggag

SEQ ID NO: 84166 - DNA, 16 bp, Homo sapiens
ctcacctctgcccagg

SEQ ID NO: 84167 - DNA, 23 bp, Homo sapiens
ctccgagtcacccggttccatct

SEQ ID NO: 84168 - DNA, 22 bp, Homo sapiens
tgtgggagtgcaatttctcggc

SEQ ID NO: 84169 - DNA, 24 bp, Homo sapiens
agccggagccctgccaccctggct

SEQ ID NO: 84170 - DNA, 16 bp, Homo sapiens
caaggggtgtcgtttg

SEQ ID NO: 84171 - DNA, 19 bp, Homo sapiens
cacctggagagaggccgcg

SEQ ID NO: 84172 - DNA, 16 bp, Homo sapiens
cctttgtcgaccggtg

SEQ ID NO: 84173 - DNA, 21 bp, Homo sapiens
ttatggtttgttttggttgtg

SEQ ID NO: 84174 - DNA, 18 bp, Homo sapiens
ttgactgtaatcacacca

SEQ ID NO: 84175 - DNA, 18 bp, Homo sapiens
gaaggaatgctcttgtct

SEQ ID NO: 84176 - DNA, 16 bp, Homo sapiens
gtggagtcccaggcgt

SEQ ID NO: 84177 - DNA, 16 bp, Homo sapiens
tttgaagattgcaccg

SEQ ID NO: 84178 - DNA, 16 bp, Homo sapiens
ggggcggtggtggtgc

SEQ ID NO: 84179 - DNA, 19 bp, Homo sapiens
ttcaaagtgggcacagatg

SEQ ID NO: 84180 - DNA, 16 bp, Homo sapiens
acagcgcactaaaaca

SEQ ID NO: 84181 - DNA, 23 bp, Homo sapiens
cacagatccatttcttggtctac

SEQ ID NO: 84182 - DNA, 17 bp, Homo sapiens
acccctacaacacaaaa

SEQ ID NO: 84183 - DNA, 18 bp, Homo sapiens
tgaatacagtggggcacc

SEQ ID NO: 84184 - DNA, 24 bp, Homo sapiens
tggtcattttggtggatatatata

SEQ ID NO: 84185 - DNA, 18 bp, Homo sapiens
aggagaggagttgggaaa

SEQ ID NO: 84186 - DNA, 22 bp, Homo sapiens
actgcccacagaaggctgggga

SEQ ID NO: 84187 - DNA, 16 bp, Homo sapiens
ttttctgggcagctga

SEQ ID NO: 84188 - DNA, 16 bp, Homo sapiens
ccgtcttgaattgtct

SEQ ID NO: 84189 - DNA, 19 bp, Homo sapiens
cccagagaaacagagaact

SEQ ID NO: 84190 - DNA, 22 bp, Homo sapiens
tggaatccaagcagaattgctc

SEQ ID NO: 84191 - DNA, 20 bp, Homo sapiens
agaaggatcccaacactggg

SEQ ID NO: 84192 - DNA, 16 bp, Homo sapiens
tgggttattcctccca

SEQ ID NO: 84193 - DNA, 19 bp, Homo sapiens
ttgtctttgttggatttga

SEQ ID NO: 84194 - DNA, 20 bp, Homo sapiens
aaaacctggttcaggtagag

SEQ ID NO: 84195 - DNA, 17 bp, Homo sapiens
caccaacagggggtgtg

SEQ ID NO: 84196 - DNA, 22 bp, Homo sapiens
gaagtaccaaggagagaaaggg

SEQ ID NO: 84197 - DNA, 16 bp, Homo sapiens
tctctatccagaggct

SEQ ID NO: 84198 - DNA, 18 bp, Homo sapiens
cattttgtcttcagatca

SEQ ID NO: 84199 - DNA, 16 bp, Homo sapiens
gatgttaccccggtgt

SEQ ID NO: 84200 - DNA, 24 bp, Homo sapiens
atcactggccaaggagctgacaca

SEQ ID NO: 84201 - DNA, 16 bp, Homo sapiens
catgtgttcagagcct

SEQ ID NO: 84202 - DNA, 22 bp, Homo sapiens
acaggatggctgaaggtgacag

SEQ ID NO: 84203 - DNA, 16 bp, Homo sapiens
gtcccacgttctccca

SEQ ID NO: 84204 - DNA, 18 bp, Homo sapiens
tctcactgaagcagcagc

SEQ ID NO: 84205 - DNA, 22 bp, Homo sapiens
ctccattggatcctcaactgca

SEQ ID NO: 84206 - DNA, 21 bp, Homo sapiens
cctaggaaggtgtggcagcca

SEQ ID NO: 84207 - DNA, 20 bp, Homo sapiens
cttaaagacctcctgggtga

SEQ ID NO: 84208 - DNA, 22 bp, Homo sapiens
ttttcttcctcatcagagctca

SEQ ID NO: 84209 - DNA, 19 bp, Homo sapiens
ttcagattctcattagtgg

SEQ ID NO: 84210 - DNA, 21 bp, Homo sapiens
cgctgtgtcatccaacgggaa

SEQ ID NO: 84211 - DNA, 16 bp, Homo sapiens
aacctttgggcttgga

SEQ ID NO: 84212 - DNA, 21 bp, Homo sapiens
gatcagaatgacaacaagccc

SEQ ID NO: 84213 - DNA, 17 bp, Homo sapiens
taacacaacaatggctt

SEQ ID NO: 84214 - DNA, 19 bp, Homo sapiens
ctagcactttggtaagaat

SEQ ID NO: 84215 - DNA, 17 bp, Homo sapiens
aggtgttcacatcatcg

SEQ ID NO: 84216 - DNA, 19 bp, Homo sapiens
gtcccctcctttatccctc

SEQ ID NO: 84217 - DNA, 18 bp, Homo sapiens
acatatttttgtcaggga

SEQ ID NO: 84218 - DNA, 20 bp, Homo sapiens
aagtgcagcttgtctaaacc

SEQ ID NO: 84219 - DNA, 16 bp, Homo sapiens
ctcggtccagcccagt

SEQ ID NO: 84220 - DNA, 18 bp, Homo sapiens
cacagacgcggacgatga

SEQ ID NO: 84221 - DNA, 19 bp, Homo sapiens
ttgtccacgggattgagct

SEQ ID NO: 84222 - DNA, 16 bp, Homo sapiens
caagatcctgagctcc

SEQ ID NO: 84223 - DNA, 16 bp, Homo sapiens
tgcaaagcttagacca

SEQ ID NO: 84224 - DNA, 19 bp, Homo sapiens
catcagtgtggtcaccact

SEQ ID NO: 84225 - DNA, 18 bp, Homo sapiens
caccagggtatacgtagg

SEQ ID NO: 84226 - DNA, 22 bp, Homo sapiens
ttccgtgcctagaagacaggca

SEQ ID NO: 84227 - DNA, 18 bp, Homo sapiens
agtgactgtgatcacagc

SEQ ID NO: 84228 - DNA, 18 bp, Homo sapiens
gttgggctgggctaggcc

SEQ ID NO: 84229 - DNA, 19 bp, Homo sapiens
ggagttatagaattaccgt

SEQ ID NO: 84230 - DNA, 18 bp, Homo sapiens
ctctctgcagagtttccc

SEQ ID NO: 84231 - DNA, 22 bp, Homo sapiens
cttcgcccatgagcagtggtga

SEQ ID NO: 84232 - DNA, 18 bp, Homo sapiens
gaggggttaagcacaaca

SEQ ID NO: 84233 - DNA, 21 bp, Homo sapiens
tgcttgcttttaagtttaaag

SEQ ID NO: 84234 - DNA, 21 bp, Homo sapiens
cctccgatcttcaatcccacc

SEQ ID NO: 84235 - DNA, 23 bp, Homo sapiens
gttgaggctacagtgagccatga

SEQ ID NO: 84236 - DNA, 16 bp, Homo sapiens
gtggtgattacgacgt

SEQ ID NO: 84237 - DNA, 22 bp, Homo sapiens
atcttatctcaaaagaacaaca

SEQ ID NO: 84238 - DNA, 19 bp, Homo sapiens
caatatggtgtatacagcc

SEQ ID NO: 84239 - DNA, 21 bp, Homo sapiens
ctgctagcagtcttggtactt

SEQ ID NO: 84240 - DNA, 16 bp, Homo sapiens
atgccatcgttgttca

SEQ ID NO: 84241 - DNA, 20 bp, Homo sapiens
gtgcctgagaacgaggctaa

SEQ ID NO: 84242 - DNA, 16 bp, Homo sapiens
tgtgaggatgccagtt

SEQ ID NO: 84243 - DNA, 18 bp, Homo sapiens
caataccccagcgtggga

SEQ ID NO: 84244 - DNA, 17 bp, Homo sapiens
tgtccccctgccaaagc

SEQ ID NO: 84245 - DNA, 19 bp, Homo sapiens
gtcgtcaccacaaatccag

SEQ ID NO: 84246 - DNA, 19 bp, Homo sapiens
ttacatgagcaggaagagc

SEQ ID NO: 84247 - DNA, 24 bp, Homo sapiens
agtaattgtggtttctgccattga

SEQ ID NO: 84248 - DNA, 17 bp, Homo sapiens
cacattcgtcactgcta

SEQ ID NO: 84249 - DNA, 23 bp, Homo sapiens
taatatattaccaaaagcaacag

SEQ ID NO: 84250 - DNA, 16 bp, Homo sapiens
acatccagcacatcca

SEQ ID NO: 84251 - DNA, 23 bp, Homo sapiens
gtttcgttttgtttttaacttca

SEQ ID NO: 84252 - DNA, 16 bp, Homo sapiens
aagtcctcggacactt

SEQ ID NO: 84253 - DNA, 17 bp, Homo sapiens
gcagtacattctacacg

SEQ ID NO: 84254 - DNA, 22 bp, Homo sapiens
ttttctgttccataaatgtgtc

SEQ ID NO: 84255 - DNA, 19 bp, Homo sapiens
acagccaccgtcaccgtgg

SEQ ID NO: 84256 - DNA, 24 bp, Homo sapiens
aaaatgatataaaataaccagttg

SEQ ID NO: 84257 - DNA, 16 bp, Homo sapiens
aagagagtggaagtgt

SEQ ID NO: 84258 - DNA, 18 bp, Homo sapiens
ggtcttgtacagacaaat

SEQ ID NO: 84259 - DNA, 16 bp, Homo sapiens
ctgcccaggagccaga

SEQ ID NO: 84260 - DNA, 17 bp, Homo sapiens
gggaagggaacaggtga

SEQ ID NO: 84261 - DNA, 22 bp, Homo sapiens
caaagtgttgggattacaggca

SEQ ID NO: 84262 - DNA, 16 bp, Homo sapiens
accagtgtccggatta

SEQ ID NO: 84263 - DNA, 23 bp, Homo sapiens
taaaaacgttggaagtaaccata

SEQ ID NO: 84264 - DNA, 16 bp, Homo sapiens
tgctgttcttcacgtg

SEQ ID NO: 84265 - DNA, 19 bp, Homo sapiens
gtcctattctaaaagccag

SEQ ID NO: 84266 - DNA, 17 bp, Homo sapiens
gaggcagcaaaggctca

SEQ ID NO: 84267 - DNA, 16 bp, Homo sapiens
ctggctggagattaat

SEQ ID NO: 84268 - DNA, 17 bp, Homo sapiens
gaactcttccctccaaa

SEQ ID NO: 84269 - DNA, 20 bp, Homo sapiens
gacagggaggattttgagca

SEQ ID NO: 84270 - DNA, 21 bp, Homo sapiens
tacccttgtactccatacatt

SEQ ID NO: 84271 - DNA, 18 bp, Homo sapiens
tggaggtcctttgggatt

SEQ ID NO: 84272 - DNA, 24 bp, Homo sapiens
ttgtcattcacatcagacaggatc

SEQ ID NO: 84273 - DNA, 22 bp, Homo sapiens
gaccactgaagagccaggacaa

SEQ ID NO: 84274 - DNA, 16 bp, Homo sapiens
tggattcctctcacag

SEQ ID NO: 84275 - DNA, 18 bp, Homo sapiens
attactgttgccaagctg

SEQ ID NO: 84276 - DNA, 16 bp, Homo sapiens
ctgctgtgaagggaga

SEQ ID NO: 84277 - DNA, 24 bp, Homo sapiens
ctggaacagggacacttctgctga

SEQ ID NO: 84278 - DNA, 16 bp, Homo sapiens
ccacttgggtcgttgt

SEQ ID NO: 84279 - DNA, 22 bp, Homo sapiens
acctcgaactatattcttctgt

SEQ ID NO: 84280 - DNA, 21 bp, Homo sapiens
gaaaggtggggatctggggga

SEQ ID NO: 84281 - DNA, 16 bp, Homo sapiens
cagaccttcctcccaa

SEQ ID NO: 84282 - DNA, 18 bp, Homo sapiens
ggaagcaagtatcaatgg

SEQ ID NO: 84283 - DNA, 21 bp, Homo sapiens
actggaccattcagtacaacg

SEQ ID NO: 84284 - DNA, 24 bp, Homo sapiens
aaaaaaaagtacatacctaaataa

SEQ ID NO: 84285 - DNA, 23 bp, Homo sapiens
ttgagattgattttgtagtcacc

SEQ ID NO: 84286 - DNA, 18 bp, Homo sapiens
gcgggtgtctttagttca

SEQ ID NO: 84287 - DNA, 17 bp, Homo sapiens
agtcacacacgctgacc

SEQ ID NO: 84288 - DNA, 21 bp, Homo sapiens
cctggtctcatcatttctttt

SEQ ID NO: 84289 - DNA, 16 bp, Homo sapiens
gcaatcctgcttcgac

SEQ ID NO: 84290 - DNA, 19 bp, Homo sapiens
aaagatggccttagaggtg

SEQ ID NO: 84291 - DNA, 17 bp, Homo sapiens
acttgccagctggactt

SEQ ID NO: 84292 - DNA, 16 bp, Homo sapiens
agaccaagtgaccacc

SEQ ID NO: 84293 - DNA, 20 bp, Homo sapiens
caaaaatcatttccaggaaa

SEQ ID NO: 84294 - DNA, 17 bp, Homo sapiens
taggaaggcacagcctg

SEQ ID NO: 84295 - DNA, 18 bp, Homo sapiens
gcataacttgggagtctc

SEQ ID NO: 84296 - DNA, 16 bp, Homo sapiens
tcttgctttgctaagt

SEQ ID NO: 84297 - DNA, 17 bp, Homo sapiens
cagggatgtgagtgtca

SEQ ID NO: 84298 - DNA, 16 bp, Homo sapiens
caccgctctcctccga

SEQ ID NO: 84299 - DNA, 18 bp, Homo sapiens
ctaactgccccctgtctg

SEQ ID NO: 84300 - DNA, 24 bp, Homo sapiens
tccttcttcatcatagtaataaac

SEQ ID NO: 84301 - DNA, 18 bp, Homo sapiens
cttctttatctttggctc

SEQ ID NO: 84302 - DNA, 20 bp, Homo sapiens
gatcaccactgagctaccaa

SEQ ID NO: 84303 - DNA, 17 bp, Homo sapiens
tgctgctcttgctgttt

SEQ ID NO: 84304 - DNA, 18 bp, Homo sapiens
ttcagagctgtttcaaat

SEQ ID NO: 84305 - DNA, 18 bp, Homo sapiens
gaggatgacacccgggac

SEQ ID NO: 84306 - DNA, 21 bp, Homo sapiens
gatgatggtcaatgacaatgt

SEQ ID NO: 84307 - DNA, 24 bp, Homo sapiens
ttagcttgaaaactgtcattttgc

SEQ ID NO: 84308 - DNA, 17 bp, Homo sapiens
tcgttacgagtcacttc

SEQ ID NO: 84309 - DNA, 22 bp, Homo sapiens
catcatccaaccataatctata

SEQ ID NO: 84310 - DNA, 16 bp, Homo sapiens
tttcatcgggattggc

SEQ ID NO: 84311 - DNA, 23 bp, Homo sapiens
ttcattgtacttcaacctttttt

SEQ ID NO: 84312 - DNA, 16 bp, Homo sapiens
atgagccatgctttgg

SEQ ID NO: 84313 - DNA, 17 bp, Homo sapiens
cctggacgctcggcctg

SEQ ID NO: 84314 - DNA, 23 bp, Homo sapiens
catagtaaaggaaagaatctaaa

SEQ ID NO: 84315 - DNA, 24 bp, Homo sapiens
gtcccccggtatcttccccgccct

SEQ ID NO: 84316 - DNA, 25 bp, Homo sapiens
agaaaaagaaaaaaaaagaaaaagg

SEQ ID NO: 84317 - DNA, 22 bp, Homo sapiens
agaatcataaggcggggctgtg

SEQ ID NO: 84318 - DNA, 19 bp, Homo sapiens
cgtggtgtgccacaagtct

SEQ ID NO: 84319 - DNA, 16 bp, Homo sapiens
gctcagactagcagct

SEQ ID NO: 84320 - DNA, 16 bp, Homo sapiens
acaggtgtgcccttcc

SEQ ID NO: 84321 - DNA, 16 bp, Homo sapiens
ccccattcgttcaagt

SEQ ID NO: 84322 - DNA, 24 bp, Homo sapiens
gaatctgaaagcggctgatactga

SEQ ID NO: 84323 - DNA, 17 bp, Homo sapiens
ctcgagtcccctagtcg

SEQ ID NO: 84324 - DNA, 17 bp, Homo sapiens
gaaggaagcggttccga

SEQ ID NO: 84325 - DNA, 19 bp, Homo sapiens
agctgaaaaaccaccagca

SEQ ID NO: 84326 - DNA, 18 bp, Homo sapiens
aaagaccaggactatgac

SEQ ID NO: 84327 - DNA, 17 bp, Homo sapiens
actgcatcactaaccag

SEQ ID NO: 84328 - DNA, 19 bp, Homo sapiens
tacggaggcggcgaggacg

SEQ ID NO: 84329 - DNA, 16 bp, Homo sapiens
ttgttcagtggagccc

SEQ ID NO: 84330 - DNA, 21 bp, Homo sapiens
agtctacctcccgccataaaa

SEQ ID NO: 84331 - DNA, 20 bp, Homo sapiens
acctattgcaagcaagggtt

SEQ ID NO: 84332 - DNA, 19 bp, Homo sapiens
gatgtcatctctcctccct

SEQ ID NO: 84333 - DNA, 19 bp, Homo sapiens
gggggtgggaggctgtcag

SEQ ID NO: 84334 - DNA, 16 bp, Homo sapiens
gccttaggcccttcaa

SEQ ID NO: 84335 - DNA, 16 bp, Homo sapiens
tgtcttgaacatgagt

SEQ ID NO: 84336 - DNA, 21 bp, Homo sapiens
gaggtgctcagtaaacatatt

SEQ ID NO: 84337 - DNA, 20 bp, Homo sapiens
ccggaggaagactaaaaaaa

SEQ ID NO: 84338 - DNA, 24 bp, Homo sapiens
gctgaatgaggccttggaactcaa

SEQ ID NO: 84339 - DNA, 24 bp, Homo sapiens
gcctttgaccatgaaggcaggatg

SEQ ID NO: 84340 - DNA, 16 bp, Homo sapiens
ctgttgctgcagatcc

SEQ ID NO: 84341 - DNA, 16 bp, Homo sapiens
ggagtagggccaggaa

SEQ ID NO: 84342 - DNA, 20 bp, Homo sapiens
aaacaattgtaacttgaacc

SEQ ID NO: 84343 - DNA, 17 bp, Homo sapiens
tccttcccagcctgggc

SEQ ID NO: 84344 - DNA, 17 bp, Homo sapiens
acttgaagtgcagtttc

SEQ ID NO: 84345 - DNA, 17 bp, Homo sapiens
tctcgaagcgctcacgc

SEQ ID NO: 84346 - DNA, 20 bp, Homo sapiens
tctgtctccaaaaaaaaaaa

SEQ ID NO: 84347 - DNA, 20 bp, Homo sapiens
ccagctttcaaaaagaaaat

SEQ ID NO: 84348 - DNA, 22 bp, Homo sapiens
attaggtgtattaaatccattt

SEQ ID NO: 84349 - DNA, 22 bp, Homo sapiens
ctcctggttgtagctaactaac

SEQ ID NO: 84350 - DNA, 21 bp, Homo sapiens
atcaggaagtaacaccatcgt

SEQ ID NO: 84351 - DNA, 16 bp, Homo sapiens
aattggggcatttgcc

SEQ ID NO: 84352 - DNA, 20 bp, Homo sapiens
tgctctctttaacaattttc

SEQ ID NO: 84353 - DNA, 17 bp, Homo sapiens
aagtggaaagtttccag

SEQ ID NO: 84354 - DNA, 16 bp, Homo sapiens
gaaaccactggatgga

SEQ ID NO: 84355 - DNA, 24 bp, Homo sapiens
tttgaggcatcactgccccctgat

SEQ ID NO: 84356 - DNA, 20 bp, Homo sapiens
cacctttccttgcctctttc

SEQ ID NO: 84357 - DNA, 21 bp, Homo sapiens
acggcattttgagtgttagac

SEQ ID NO: 84358 - DNA, 16 bp, Homo sapiens
gacaagaagcggtgga

SEQ ID NO: 84359 - DNA, 22 bp, Homo sapiens
gtacctgaagggtgaaatattc

SEQ ID NO: 84360 - DNA, 16 bp, Homo sapiens
tccgcaagaaagggga

SEQ ID NO: 84361 - DNA, 24 bp, Homo sapiens
gttgttgggcagtgctaggaaaga

SEQ ID NO: 84362 - DNA, 16 bp, Homo sapiens
tgaggtgcgtgtttgt

SEQ ID NO: 84363 - DNA, 18 bp, Homo sapiens
cacccttggtctcctcca

SEQ ID NO: 84364 - DNA, 17 bp, Homo sapiens
gcctcttgcttctcttt

SEQ ID NO: 84365 - DNA, 19 bp, Homo sapiens
tgggggcagctcgtggtga

SEQ ID NO: 84366 - DNA, 16 bp, Homo sapiens
ttgggagtagatggag

SEQ ID NO: 84367 - DNA, 21 bp, Homo sapiens
gtctctcccaggacaggcaca

SEQ ID NO: 84368 - DNA, 20 bp, Homo sapiens
taacctgtggcttctcctcc

SEQ ID NO: 84369 - DNA, 18 bp, Homo sapiens
agaaaactgagtgggagc

SEQ ID NO: 84370 - DNA, 16 bp, Homo sapiens
catgaaccggaggccc

SEQ ID NO: 84371 - DNA, 22 bp, Homo sapiens
gtagtatggaagaaatcggtaa

SEQ ID NO: 84372 - DNA, 24 bp, Homo sapiens
atctcctaggttggctctgactgt

SEQ ID NO: 84373 - DNA, 23 bp, Homo sapiens
gctggggcacagcaggccagtgt

SEQ ID NO: 84374 - DNA, 24 bp, Homo sapiens
aaggcctcccctgcttgccacagg

SEQ ID NO: 84375 - DNA, 16 bp, Homo sapiens
gatggtgaggatgggc

SEQ ID NO: 84376 - DNA, 16 bp, Homo sapiens
agttgtagtggatggt

SEQ ID NO: 84377 - DNA, 24 bp, Homo sapiens
agttttttcaactgtgcaatagtt

SEQ ID NO: 84378 - DNA, 18 bp, Homo sapiens
acagaaacacttttcgac

SEQ ID NO: 84379 - DNA, 19 bp, Homo sapiens
tcaaataagcagcaggaga

SEQ ID NO: 84380 - DNA, 22 bp, Homo sapiens
taggtctggcccctcctcagca

SEQ ID NO: 84381 - DNA, 21 bp, Homo sapiens
cacccttaacccctcctccca

SEQ ID NO: 84382 - DNA, 23 bp, Homo sapiens
gagacgacagggctggttgccca

SEQ ID NO: 84383 - DNA, 16 bp, Homo sapiens
accacactatgtcgaa

SEQ ID NO: 84384 - DNA, 16 bp, Homo sapiens
tgcccccaccatgagc

SEQ ID NO: 84385 - DNA, 16 bp, Homo sapiens
ttccactcggataaga

SEQ ID NO: 84386 - DNA, 24 bp, Homo sapiens
cgcccggcacccgcgtccgcgcca

SEQ ID NO: 84387 - DNA, 20 bp, Homo sapiens
aatcagaggcctggggaccc

SEQ ID NO: 84388 - DNA, 22 bp, Homo sapiens
gttttgccaactggccaagacc

SEQ ID NO: 84389 - DNA, 18 bp, Homo sapiens
gctatctgagcagcgctc

SEQ ID NO: 84390 - DNA, 23 bp, Homo sapiens
ccctgactttcaactctgtctcc

SEQ ID NO: 84391 - DNA, 17 bp, Homo sapiens
gactgcttgtagatggc

SEQ ID NO: 84392 - DNA, 19 bp, Homo sapiens
catgtttgtttctttgctg

SEQ ID NO: 84393 - DNA, 23 bp, Homo sapiens
atcaacccacagctgcacagggc

SEQ ID NO: 84394 - DNA, 19 bp, Homo sapiens
aaagctcctgaggtgtaga

SEQ ID NO: 84395 - DNA, 18 bp, Homo sapiens
cttgcattctgggacagc

SEQ ID NO: 84396 - DNA, 24 bp, Homo sapiens
taaaaaaacactgacaggaagcca

SEQ ID NO: 84397 - DNA, 16 bp, Homo sapiens
tcatcttctgtccctt

SEQ ID NO: 84398 - DNA, 24 bp, Homo sapiens
gaaatgcagggggatacggccagg

SEQ ID NO: 84399 - DNA, 16 bp, Homo sapiens
ccctgcaccagcagct

SEQ ID NO: 84400 - DNA, 17 bp, Homo sapiens
caagtcacagacttggc

SEQ ID NO: 84401 - DNA, 16 bp, Homo sapiens
ggttcactgaagaccc

SEQ ID NO: 84402 - DNA, 21 bp, Homo sapiens
gccctggtaggttttctggga

SEQ ID NO: 84403 - DNA, 16 bp, Homo sapiens
cttgccgtcccaagca

SEQ ID NO: 84404 - DNA, 22 bp, Homo sapiens
tgcaggggccgccggtgtagga

SEQ ID NO: 84405 - DNA, 17 bp, Homo sapiens
gggctggggggctgggg

SEQ ID NO: 84406 - DNA, 18 bp, Homo sapiens
gagcttcatctggacctg

SEQ ID NO: 84407 - DNA, 17 bp, Homo sapiens
cgttctggtaaggacaa

SEQ ID NO: 84408 - DNA, 18 bp, Homo sapiens
tcaaatcatccattgctt

SEQ ID NO: 84409 - DNA, 16 bp, Homo sapiens
tgtgggaagcgaaaat

SEQ ID NO: 84410 - DNA, 24 bp, Homo sapiens
aagagcagtcagaggaccaggtcc

SEQ ID NO: 84411 - DNA, 24 bp, Homo sapiens
agtggatccattggaagggcaggc

SEQ ID NO: 84412 - DNA, 16 bp, Homo sapiens
ccagcccaacccttgt

SEQ ID NO: 84413 - DNA, 18 bp, Homo sapiens
tagcgtcgagccccctct

SEQ ID NO: 84414 - DNA, 22 bp, Homo sapiens
acaagagcagaaagtcagtccc

SEQ ID NO: 84415 - DNA, 16 bp, Homo sapiens
ttgcagcagccagact

SEQ ID NO: 84416 - DNA, 16 bp, Homo sapiens
ttggggtgggggtggt

SEQ ID NO: 84417 - DNA, 18 bp, Homo sapiens
tccttctctgcaggccca

SEQ ID NO: 84418 - DNA, 18 bp, Homo sapiens
gaaaatgtttcctgactc

SEQ ID NO: 84419 - DNA, 20 bp, Homo sapiens
cttttcctgctccacaggaa

SEQ ID NO: 84420 - DNA, 18 bp, Homo sapiens
gttcaactttgagttcgg

SEQ ID NO: 84421 - DNA, 19 bp, Homo sapiens
acttgatgagtcctctctg

SEQ ID NO: 84422 - DNA, 18 bp, Homo sapiens
caatgcaactcctatgat

SEQ ID NO: 84423 - DNA, 16 bp, Homo sapiens
gggagcgtgctttcca

SEQ ID NO: 84424 - DNA, 16 bp, Homo sapiens
agtccccactgcccca

SEQ ID NO: 84425 - DNA, 24 bp, Homo sapiens
aagtctagagccaccgtccaggga

SEQ ID NO: 84426 - DNA, 17 bp, Homo sapiens
cgagagcccgtgactca

SEQ ID NO: 84427 - DNA, 16 bp, Homo sapiens
ttttcccctcccatgt

SEQ ID NO: 84428 - DNA, 24 bp, Homo sapiens
agggaagcgtgtcaccgtcgtgga

SEQ ID NO: 84429 - DNA, 24 bp, Homo sapiens
ttacttgcccttacttgtcatggc

SEQ ID NO: 84430 - DNA, 18 bp, Homo sapiens
cagcagctacctgctccc

SEQ ID NO: 84431 - DNA, 18 bp, Homo sapiens
tctgcaccctcctcccca

SEQ ID NO: 84432 - DNA, 16 bp, Homo sapiens
agtcttgagcacatgg

SEQ ID NO: 84433 - DNA, 18 bp, Homo sapiens
gaattttccaccccaaaa

SEQ ID NO: 84434 - DNA, 18 bp, Homo sapiens
ctcctggcacaaagctgg

SEQ ID NO: 84435 - DNA, 18 bp, Homo sapiens
cacaatgcaggattcctc

SEQ ID NO: 84436 - DNA, 22 bp, Homo sapiens
cggaggaagcaaaggaaatgga

SEQ ID NO: 84437 - DNA, 18 bp, Homo sapiens
aaaggatccagctgagag

SEQ ID NO: 84438 - DNA, 22 bp, Homo sapiens
gtagatactaacattttggggt

SEQ ID NO: 84439 - DNA, 18 bp, Homo sapiens
acgttagggtgtgatatt

SEQ ID NO: 84440 - DNA, 18 bp, Homo sapiens
attggtggaaatcatttt

SEQ ID NO: 84441 - DNA, 18 bp, Homo sapiens
agagtgataagggttgtg

SEQ ID NO: 84442 - DNA, 24 bp, Homo sapiens
caggccccaaacctgacagggccg

SEQ ID NO: 84443 - DNA, 20 bp, Homo sapiens
acaagtcacacctcatgtcc

SEQ ID NO: 84444 - DNA, 20 bp, Homo sapiens
ctccttccagcagttgagaa

SEQ ID NO: 84445 - DNA, 16 bp, Homo sapiens
gaggaggacaatgtca

SEQ ID NO: 84446 - DNA, 21 bp, Homo sapiens
cagccatccctgtctttaggc

SEQ ID NO: 84447 - DNA, 23 bp, Homo sapiens
ttttaagttcaccaaggtggaca

SEQ ID NO: 84448 - DNA, 16 bp, Homo sapiens
gtggggctgcggaccg

SEQ ID NO: 84449 - DNA, 17 bp, Homo sapiens
ggtgtctgagtgttttg

SEQ ID NO: 84450 - DNA, 24 bp, Homo sapiens
atccagaacttcagcagcttgaca

SEQ ID NO: 84451 - DNA, 23 bp, Homo sapiens
gctcctgctggtgccaaagccgt

SEQ ID NO: 84452 - DNA, 21 bp, Homo sapiens
cttctgtgtgtcctctttggg

SEQ ID NO: 84453 - DNA, 19 bp, Homo sapiens
gttcaggggccaagcctgc

SEQ ID NO: 84454 - DNA, 24 bp, Homo sapiens
gagctttgcagtggcggacgtgga

SEQ ID NO: 84455 - DNA, 21 bp, Homo sapiens
tctgaccaaccagaacctgtc

SEQ ID NO: 84456 - DNA, 19 bp, Homo sapiens
cctcagtggccacggccca

SEQ ID NO: 84457 - DNA, 20 bp, Homo sapiens
tgcccctgcccttctcccca

SEQ ID NO: 84458 - DNA, 23 bp, Homo sapiens
gtcgcaagcaaaggggcctcacc

SEQ ID NO: 84459 - DNA, 16 bp, Homo sapiens
gtgtcctttttgtgag

SEQ ID NO: 84460 - DNA, 22 bp, Homo sapiens
gcactggtccaccacatccaca

SEQ ID NO: 84461 - DNA, 24 bp, Homo sapiens
gcaagtacgagtttgtggtgacca

SEQ ID NO: 84462 - DNA, 22 bp, Homo sapiens
ttattcaggatggtggggccca

SEQ ID NO: 84463 - DNA, 16 bp, Homo sapiens
cgcacgttccaccctc

SEQ ID NO: 84464 - DNA, 18 bp, Homo sapiens
cgggggcatcttctcaca

SEQ ID NO: 84465 - DNA, 22 bp, Homo sapiens
ggagatgaggagccacgggcct

SEQ ID NO: 84466 - DNA, 17 bp, Homo sapiens
ctacagggctcccactg

SEQ ID NO: 84467 - DNA, 16 bp, Homo sapiens
ctgggatgagcggagt

SEQ ID NO: 84468 - DNA, 23 bp, Homo sapiens
cctcacaccccacagggtggagg

SEQ ID NO: 84469 - DNA, 23 bp, Homo sapiens
ggttttaaataccaaagcattga

SEQ ID NO: 84470 - DNA, 22 bp, Homo sapiens
ccgctacctgtgtgaagataga

SEQ ID NO: 84471 - DNA, 21 bp, Homo sapiens
cctggggctcagcccgcacgt

SEQ ID NO: 84472 - DNA, 21 bp, Homo sapiens
gaggcctcctctccacaaccc

SEQ ID NO: 84473 - DNA, 20 bp, Homo sapiens
gtgggctgcgtccgcatcat

SEQ ID NO: 84474 - DNA, 21 bp, Homo sapiens
tggggaacctcagcgcagggc

SEQ ID NO: 84475 - DNA, 23 bp, Homo sapiens
cggggctgagggcttcctcgtgt

SEQ ID NO: 84476 - DNA, 22 bp, Homo sapiens
agagcacgtggggggggatctg

SEQ ID NO: 84477 - DNA, 20 bp, Homo sapiens
ttggaccgggctgcaggagg

SEQ ID NO: 84478 - DNA, 20 bp, Homo sapiens
gtactggctgctgtatggga

SEQ ID NO: 84479 - DNA, 16 bp, Homo sapiens
ctcacccccactgtgg

SEQ ID NO: 84480 - DNA, 22 bp, Homo sapiens
gacccgggtctccgtgcccact

SEQ ID NO: 84481 - DNA, 18 bp, Homo sapiens
aaccaggtgatctggaaa

SEQ ID NO: 84482 - DNA, 20 bp, Homo sapiens
cagtcggtgcaccttggcat

SEQ ID NO: 84483 - DNA, 18 bp, Homo sapiens
cactctcttgtttaggtc

SEQ ID NO: 84484 - DNA, 17 bp, Homo sapiens
ccgcacacctaaggaaa

SEQ ID NO: 84485 - DNA, 16 bp, Homo sapiens
acttcatgggaaggga

SEQ ID NO: 84486 - DNA, 16 bp, Homo sapiens
gtccacgtctctgctt

SEQ ID NO: 84487 - DNA, 20 bp, Homo sapiens
ctgagaagataagtgtcttt

SEQ ID NO: 84488 - DNA, 17 bp, Homo sapiens
ggaaagaaggggcaccc

SEQ ID NO: 84489 - DNA, 22 bp, Homo sapiens
gatcctatggctaataccccca

SEQ ID NO: 84490 - DNA, 20 bp, Homo sapiens
cagccccggaagctgccagt

SEQ ID NO: 84491 - DNA, 21 bp, Homo sapiens
gtcacttcctgcagggttttg

SEQ ID NO: 84492 - DNA, 24 bp, Homo sapiens
gaagggcgggagctgacccagggc

SEQ ID NO: 84493 - DNA, 24 bp, Homo sapiens
ggacagcccatgactggctctcct

SEQ ID NO: 84494 - DNA, 23 bp, Homo sapiens
ggacaactctgaggctgaagagg

SEQ ID NO: 84495 - DNA, 16 bp, Homo sapiens
ccggagggacttgaag

SEQ ID NO: 84496 - DNA, 23 bp, Homo sapiens
ttgtatctgtaactgtccttgtc

SEQ ID NO: 84497 - DNA, 16 bp, Homo sapiens
agagaggaggactctg

SEQ ID NO: 84498 - DNA, 22 bp, Homo sapiens
ggaatctacactgaccggctca

SEQ ID NO: 84499 - DNA, 24 bp, Homo sapiens
acacaggggctttctcctcctctt

SEQ ID NO: 84500 - DNA, 20 bp, Homo sapiens
ccagggctcccagagcaaca

SEQ ID NO: 84501 - DNA, 16 bp, Homo sapiens
agaacgagccttcggg

SEQ ID NO: 84502 - DNA, 24 bp, Homo sapiens
taatcagccagttctctctacaga

SEQ ID NO: 84503 - DNA, 16 bp, Homo sapiens
gtctgctctcctggca

SEQ ID NO: 84504 - DNA, 24 bp, Homo sapiens
gattctttcacatggcggtcaagg

SEQ ID NO: 84505 - DNA, 16 bp, Homo sapiens
tggtgaggcaggggtg

SEQ ID NO: 84506 - DNA, 19 bp, Homo sapiens
cacaccgagatcggagggt

SEQ ID NO: 84507 - DNA, 19 bp, Homo sapiens
tgaccgagaagctcctgga

SEQ ID NO: 84508 - DNA, 22 bp, Homo sapiens
cgtttccctccctcagcgattc

SEQ ID NO: 84509 - DNA, 16 bp, Homo sapiens
ctcatagctggtgctg

SEQ ID NO: 84510 - DNA, 17 bp, Homo sapiens
gggccaaggccccggca

SEQ ID NO: 84511 - DNA, 18 bp, Homo sapiens
ttaaactggtaggatcag

SEQ ID NO: 84512 - DNA, 19 bp, Homo sapiens
aaggtatcctcggtcggag

SEQ ID NO: 84513 - DNA, 24 bp, Homo sapiens
ttgtggaactgcctgcatgcggga

SEQ ID NO: 84514 - DNA, 20 bp, Homo sapiens
tgatgacaacctgtgggcgt

SEQ ID NO: 84515 - DNA, 19 bp, Homo sapiens
gaggcagcaagcaaacacg

SEQ ID NO: 84516 - DNA, 17 bp, Homo sapiens
ttcctacaccagaggaa

SEQ ID NO: 84517 - DNA, 16 bp, Homo sapiens
aatgtatcgtgactgc

SEQ ID NO: 84518 - DNA, 16 bp, Homo sapiens
ttgaggcagagcagtt

SEQ ID NO: 84519 - DNA, 17 bp, Homo sapiens
aaaggaggtgtgcaggc

SEQ ID NO: 84520 - DNA, 16 bp, Homo sapiens
gagctgctggcagctt

SEQ ID NO: 84521 - DNA, 23 bp, Homo sapiens
gagcgggcggcgttgccgttcct

SEQ ID NO: 84522 - DNA, 17 bp, Homo sapiens
gagtatagtgggactga

SEQ ID NO: 84523 - DNA, 16 bp, Homo sapiens
gctgtgggcatccaaa

SEQ ID NO: 84524 - DNA, 24 bp, Homo sapiens
ctgggaggctcctcacgacctcca

SEQ ID NO: 84525 - DNA, 18 bp, Homo sapiens
aggtccggggaatcatcg

SEQ ID NO: 84526 - DNA, 16 bp, Homo sapiens
ctgtaagcagagggga

SEQ ID NO: 84527 - DNA, 22 bp, Homo sapiens
atcatcaccatcatgatggacc

SEQ ID NO: 84528 - DNA, 24 bp, Homo sapiens
cagagcggctcatgcagtgcaggg

SEQ ID NO: 84529 - DNA, 20 bp, Homo sapiens
tgttcagccacaccttcttc

SEQ ID NO: 84530 - DNA, 16 bp, Homo sapiens
cttgccctggagctca

SEQ ID NO: 84531 - DNA, 23 bp, Homo sapiens
ctccaggtctgccctggccgtga

SEQ ID NO: 84532 - DNA, 22 bp, Homo sapiens
ttgatgaggtagatccggtcca

SEQ ID NO: 84533 - DNA, 17 bp, Homo sapiens
ggctttgatttggtgtc

SEQ ID NO: 84534 - DNA, 20 bp, Homo sapiens
ggccaggctgtccttgatga

SEQ ID NO: 84535 - DNA, 16 bp, Homo sapiens
cccgttattaacgctg

SEQ ID NO: 84536 - DNA, 21 bp, Homo sapiens
tccgaagaagatggggccttc

SEQ ID NO: 84537 - DNA, 22 bp, Homo sapiens
gcaattctggacaagggaggcg

SEQ ID NO: 84538 - DNA, 18 bp, Homo sapiens
cagctcttcagcattgtc

SEQ ID NO: 84539 - DNA, 24 bp, Homo sapiens
ctgagagaggaccagtgcctgcct

SEQ ID NO: 84540 - DNA, 23 bp, Homo sapiens
atatcagccatgataaagagacc

SEQ ID NO: 84541 - DNA, 24 bp, Homo sapiens
acctgggagcatgtgggctcccac

SEQ ID NO: 84542 - DNA, 21 bp, Homo sapiens
cagatttacttttccttttca

SEQ ID NO: 84543 - DNA, 17 bp, Homo sapiens
ggacacaggcctggcgg

SEQ ID NO: 84544 - DNA, 23 bp, Homo sapiens
ttccgagctcagatttgcataaa

SEQ ID NO: 84545 - DNA, 17 bp, Homo sapiens
gacgtatttaatggagg

SEQ ID NO: 84546 - DNA, 27 bp, Homo sapiens
acatttaaatcttcagataagtataaa

SEQ ID NO: 84547 - DNA, 19 bp, Homo sapiens
caagtgaccggcagccctg

SEQ ID NO: 84548 - DNA, 20 bp, Homo sapiens
aaacaaaacaaaacaaaagc

SEQ ID NO: 84549 - DNA, 24 bp, Homo sapiens
gcagagggggccagcgtcgagtcc

SEQ ID NO: 84550 - DNA, 24 bp, Homo sapiens
tgagaagcagtctgtgtcaccccg

SEQ ID NO: 84551 - DNA, 17 bp, Homo sapiens
ggaagaagaggaaggtg

SEQ ID NO: 84552 - DNA, 16 bp, Homo sapiens
gcagggatcacaaaac

SEQ ID NO: 84553 - DNA, 16 bp, Homo sapiens
cccacttcctcaaggg

SEQ ID NO: 84554 - DNA, 24 bp, Homo sapiens
cgactttttgggccccgggctgct

SEQ ID NO: 84555 - DNA, 16 bp, Homo sapiens
ctgccacttctgcgag

SEQ ID NO: 84556 - DNA, 21 bp, Homo sapiens
ccgactgttcatctgaatgcc

SEQ ID NO: 84557 - DNA, 20 bp, Homo sapiens
gacatgtcccctgtcccacg

SEQ ID NO: 84558 - DNA, 17 bp, Homo sapiens
tcattcccatccccttg

SEQ ID NO: 84559 - DNA, 24 bp, Homo sapiens
tgctccctgtgctccagaggggct

SEQ ID NO: 84560 - DNA, 24 bp, Homo sapiens
aagagagtgcgggggccgtggagc

SEQ ID NO: 84561 - DNA, 16 bp, Homo sapiens
ctggggaactggcggg

SEQ ID NO: 84562 - DNA, 21 bp, Homo sapiens
ctgaccacggcctggacccat

SEQ ID NO: 84563 - DNA, 23 bp, Homo sapiens
ctgcactccacagaccctctcct

SEQ ID NO: 84564 - DNA, 18 bp, Homo sapiens
actccgctcccacctccc

SEQ ID NO: 84565 - DNA, 23 bp, Homo sapiens
gccctcttcccggcccagggcgc

SEQ ID NO: 84566 - DNA, 17 bp, Homo sapiens
gcagccgcgggggaggc

SEQ ID NO: 84567 - DNA, 18 bp, Homo sapiens
cgcgcacaggccggtgga

SEQ ID NO: 84568 - DNA, 24 bp, Homo sapiens
cttggccacccccacttatccccc

SEQ ID NO: 84569 - DNA, 18 bp, Homo sapiens
gtatgtgtgttctgctgt

SEQ ID NO: 84570 - DNA, 19 bp, Homo sapiens
aggtatctgtggttgatgc

SEQ ID NO: 84571 - DNA, 19 bp, Homo sapiens
aaccaaagaaaacttgtat

SEQ ID NO: 84572 - DNA, 19 bp, Homo sapiens
gttatttatggtcgttttt

SEQ ID NO: 84573 - DNA, 20 bp, Homo sapiens
cccaaatactcaccatattg

SEQ ID NO: 84574 - DNA, 20 bp, Homo sapiens
gcttccaataaaaacaggac

SEQ ID NO: 84575 - DNA, 21 bp, Homo sapiens
caaaatatgctgttctaaact

SEQ ID NO: 84576 - DNA, 24 bp, Homo sapiens
aaggaatgtctaatcaatatttcc

SEQ ID NO: 84577 - DNA, 22 bp, Homo sapiens
gtaaacaaaataagattaatgg

SEQ ID NO: 84578 - DNA, 24 bp, Homo sapiens
tttaaagaatgttaacaatatggt

SEQ ID NO: 84579 - DNA, 21 bp, Homo sapiens
tgaggattaggataaaatcag

SEQ ID NO: 84580 - DNA, 23 bp, Homo sapiens
atataatcaactgagagagatat

SEQ ID NO: 84581 - DNA, 20 bp, Homo sapiens
atggaagactattgttgatc

SEQ ID NO: 84582 - DNA, 18 bp, Homo sapiens
agcctgcctacttaagat

SEQ ID NO: 84583 - DNA, 22 bp, Homo sapiens
gaaagtgaaactaacttttatg

SEQ ID NO: 84584 - DNA, 16 bp, Homo sapiens
ttggtccacatctgta

SEQ ID NO: 84585 - DNA, 21 bp, Homo sapiens
agaagctgctgaaaaaaattt

SEQ ID NO: 84586 - DNA, 18 bp, Homo sapiens
aggtcagctatattaaca

SEQ ID NO: 84587 - DNA, 21 bp, Homo sapiens
atctatagacagatgtagcaa

SEQ ID NO: 84588 - DNA, 18 bp, Homo sapiens
tgaccagcatcgtttcat

SEQ ID NO: 84589 - DNA, 24 bp, Homo sapiens
taggtggtgtgtatgtaaggtgtt

SEQ ID NO: 84590 - DNA, 17 bp, Homo sapiens
ctggtttccttcacgac

SEQ ID NO: 84591 - DNA, 21 bp, Homo sapiens
agaaaatgtttacaggtaaaa

SEQ ID NO: 84592 - DNA, 16 bp, Homo sapiens
gttgttgcagctgaga

SEQ ID NO: 84593 - DNA, 19 bp, Homo sapiens
accaaaggacacaatgaga

SEQ ID NO: 84594 - DNA, 18 bp, Homo sapiens
gtagtcccatgtggattt

SEQ ID NO: 84595 - DNA, 17 bp, Homo sapiens
ttcttcacacctgtcgt

SEQ ID NO: 84596 - DNA, 20 bp, Homo sapiens
ctcatttccattaacttttt

SEQ ID NO: 84597 - DNA, 21 bp, Homo sapiens
tctggggttttattttctctc

SEQ ID NO: 84598 - DNA, 16 bp, Homo sapiens
gtcaaagctgctgtga

SEQ ID NO: 84599 - DNA, 22 bp, Homo sapiens
tttttttagagatgatgtcttg

SEQ ID NO: 84600 - DNA, 17 bp, Homo sapiens
agtggtcctcctgcctt

SEQ ID NO: 84601 - DNA, 19 bp, Homo sapiens
ttcaggagtcgttttaatt

SEQ ID NO: 84602 - DNA, 21 bp, Homo sapiens
acctgtcccctaatacttaat

SEQ ID NO: 84603 - DNA, 21 bp, Homo sapiens
gtacattcatgatactagttt

SEQ ID NO: 84604 - DNA, 17 bp, Homo sapiens
tgtttgttcagaagaca

SEQ ID NO: 84605 - DNA, 25 bp, Homo sapiens
aaatgtcattataaaatccagtttg

SEQ ID NO: 84606 - DNA, 20 bp, Homo sapiens
aatgtggattgtgcaaaatt

SEQ ID NO: 84607 - DNA, 18 bp, Homo sapiens
atcgagttttgggtttat

SEQ ID NO: 84608 - DNA, 19 bp, Homo sapiens
tttataactgctaactgcg

SEQ ID NO: 84609 - DNA, 19 bp, Homo sapiens
ttggagcaaaagtaatacg

SEQ ID NO: 84610 - DNA, 25 bp, Homo sapiens
gcaaattttacatcaaaaacaaaat

SEQ ID NO: 84611 - DNA, 26 bp, Homo sapiens
gttaacttattctagagttaattttt

SEQ ID NO: 84612 - DNA, 18 bp, Homo sapiens
tgaatgtgaaactatcac

SEQ ID NO: 84613 - DNA, 21 bp, Homo sapiens
tttaaagccctaaagaaggtt

SEQ ID NO: 84614 - DNA, 23 bp, Homo sapiens
ataaaatgtcacaaacttctaac

SEQ ID NO: 84615 - DNA, 18 bp, Homo sapiens
agttatgacttgagtgat

SEQ ID NO: 84616 - DNA, 18 bp, Homo sapiens
cagtctgtgggatctggt

SEQ ID NO: 84617 - DNA, 19 bp, Homo sapiens
tgaaggaagttagaagttt

SEQ ID NO: 84618 - DNA, 20 bp, Homo sapiens
acaagtaggcatttaaaaga

SEQ ID NO: 84619 - DNA, 19 bp, Homo sapiens
actgtaaagacatgtggtt

SEQ ID NO: 84620 - DNA, 18 bp, Homo sapiens
agatgtaaaagcaccttt

SEQ ID NO: 84621 - DNA, 22 bp, Homo sapiens
ccagatgaatttacaaaactgt

SEQ ID NO: 84622 - DNA, 19 bp, Homo sapiens
gtctacttaccagaatgca

SEQ ID NO: 84623 - DNA, 16 bp, Homo sapiens
ttggtgctttcagcaa

SEQ ID NO: 84624 - DNA, 19 bp, Homo sapiens
taaaaatgttgcccttggg

SEQ ID NO: 84625 - DNA, 18 bp, Homo sapiens
tcctggattatttctgga

SEQ ID NO: 84626 - DNA, 24 bp, Homo sapiens
ttgttcctatctaataatgtcatt

SEQ ID NO: 84627 - DNA, 22 bp, Homo sapiens
ggaaataattttgccctcctta

SEQ ID NO: 84628 - DNA, 17 bp, Homo sapiens
tggtggatggttttgct

SEQ ID NO: 84629 - DNA, 19 bp, Homo sapiens
cctaaagtaatacacacct

SEQ ID NO: 84630 - DNA, 22 bp, Homo sapiens
ctacaaatcattctccttatct

SEQ ID NO: 84631 - DNA, 20 bp, Homo sapiens
atcaaacaaagaaacctaaa

SEQ ID NO: 84632 - DNA, 20 bp, Homo sapiens
gatgaaaacaacatgaataa

SEQ ID NO: 84633 - DNA, 21 bp, Homo sapiens
tgaccactacttaaattatga

SEQ ID NO: 84634 - DNA, 16 bp, Homo sapiens
tcagctgcctacttcc

SEQ ID NO: 84635 - DNA, 23 bp, Homo sapiens
tagtatgagttttagaggctgtt

SEQ ID NO: 84636 - DNA, 19 bp, Homo sapiens
atcttcccaattgatgtaa

SEQ ID NO: 84637 - DNA, 22 bp, Homo sapiens
attatcttatcgctatatttga

SEQ ID NO: 84638 - DNA, 18 bp, Homo sapiens
gcatgttaccttaagatc

SEQ ID NO: 84639 - DNA, 16 bp, Homo sapiens
agctcttgctggccat

SEQ ID NO: 84640 - DNA, 22 bp, Homo sapiens
acataatacttatgctagaaaa

SEQ ID NO: 84641 - DNA, 18 bp, Homo sapiens
actgtgtaaagcaagtac

SEQ ID NO: 84642 - DNA, 19 bp, Homo sapiens
aagcaagtcctatgaactt

SEQ ID NO: 84643 - DNA, 21 bp, Homo sapiens
ctacttgttcagtccatggtg

SEQ ID NO: 84644 - DNA, 20 bp, Homo sapiens
ggaagaattgtatcagactg

SEQ ID NO: 84645 - DNA, 16 bp, Homo sapiens
gactgcctcttgagaa

SEQ ID NO: 84646 - DNA, 20 bp, Homo sapiens
cagctggattttactgccat

SEQ ID NO: 84647 - DNA, 16 bp, Homo sapiens
gagggcttatacgaaa

SEQ ID NO: 84648 - DNA, 19 bp, Homo sapiens
tgcatgggtatttaaaggc

SEQ ID NO: 84649 - DNA, 18 bp, Homo sapiens
ggataacagcatcagtaa

SEQ ID NO: 84650 - DNA, 18 bp, Homo sapiens
ccaagtaagccattctca

SEQ ID NO: 84651 - DNA, 21 bp, Homo sapiens
gtgagaaataccgataaaagt

SEQ ID NO: 84652 - DNA, 20 bp, Homo sapiens
ttgactgccttgtttcttgc

SEQ ID NO: 84653 - DNA, 20 bp, Homo sapiens
aagtttaaaaaaaaaacact

SEQ ID NO: 84654 - DNA, 17 bp, Homo sapiens
tgtagaaggtgaattct

SEQ ID NO: 84655 - DNA, 23 bp, Homo sapiens
ttcaagaccttaaaaacttagtg

SEQ ID NO: 84656 - DNA, 18 bp, Homo sapiens
agcaataccttttggact

SEQ ID NO: 84657 - DNA, 24 bp, Homo sapiens
tcatttgtattactgagtattttt

SEQ ID NO: 84658 - DNA, 23 bp, Homo sapiens
agagtgcatttcttaaaaagaaa

SEQ ID NO: 84659 - DNA, 16 bp, Homo sapiens
atctgcctggctcaga

SEQ ID NO: 84660 - DNA, 20 bp, Homo sapiens
caccatggagaaattttcct

SEQ ID NO: 84661 - DNA, 19 bp, Homo sapiens
ccatcgaatcatcaccaat

SEQ ID NO: 84662 - DNA, 22 bp, Homo sapiens
gtcattattgcttttttccgct

SEQ ID NO: 84663 - DNA, 16 bp, Homo sapiens
agcagctcagccactt

SEQ ID NO: 84664 - DNA, 23 bp, Homo sapiens
gctttgcataaatgcttaaaatt

SEQ ID NO: 84665 - DNA, 16 bp, Homo sapiens
accaagtacactgagg

SEQ ID NO: 84666 - DNA, 21 bp, Homo sapiens
tgtggctagttactttaattg

SEQ ID NO: 84667 - DNA, 22 bp, Homo sapiens
ttagtgtttgaattaaagacgt

SEQ ID NO: 84668 - DNA, 18 bp, Homo sapiens
gagtgacaatacacagca

SEQ ID NO: 84669 - DNA, 16 bp, Homo sapiens
agaaagttcccgacaa

SEQ ID NO: 84670 - DNA, 18 bp, Homo sapiens
gtgtgctccacaaccttg

SEQ ID NO: 84671 - DNA, 22 bp, Homo sapiens
caactcacgtaattttgtactt

SEQ ID NO: 84672 - DNA, 18 bp, Homo sapiens
agaaaggaggtgagattc

SEQ ID NO: 84673 - DNA, 16 bp, Homo sapiens
gcctaagattgatgct

SEQ ID NO: 84674 - DNA, 20 bp, Homo sapiens
ttctctaaaataaccaaagc

SEQ ID NO: 84675 - DNA, 18 bp, Homo sapiens
aacacttcataaagcagt

SEQ ID NO: 84676 - DNA, 24 bp, Homo sapiens
agtattcaacaatattctagatac

SEQ ID NO: 84677 - DNA, 20 bp, Homo sapiens
ttatgcttactattgagtgt

SEQ ID NO: 84678 - DNA, 21 bp, Homo sapiens
tccaggtctgtaggtttttct

SEQ ID NO: 84679 - DNA, 24 bp, Homo sapiens
ttttcaaaggtttttaataataaa

SEQ ID NO: 84680 - DNA, 19 bp, Homo sapiens
tggatctgcatgaattagt

SEQ ID NO: 84681 - DNA, 19 bp, Homo sapiens
gtctgataccatgtttttg

SEQ ID NO: 84682 - DNA, 20 bp, Homo sapiens
aacttagtgtgataattttg

SEQ ID NO: 84683 - DNA, 22 bp, Homo sapiens
aaagtaacaagccttaaattta

SEQ ID NO: 84684 - DNA, 16 bp, Homo sapiens
agtgctcttgagctaa

SEQ ID NO: 84685 - DNA, 18 bp, Homo sapiens
tcttgtccatggtgaaac

SEQ ID NO: 84686 - DNA, 27 bp, Homo sapiens
gtattcattatacattagttttcttag

SEQ ID NO: 84687 - DNA, 21 bp, Homo sapiens
aagtcctgggcttacaggcgt

SEQ ID NO: 84688 - DNA, 16 bp, Homo sapiens
ttctgctgtactgcct

SEQ ID NO: 84689 - DNA, 22 bp, Homo sapiens
cacccctaaaagaaacttggta

SEQ ID NO: 84690 - DNA, 17 bp, Homo sapiens
gcttcctgagcaatctc

SEQ ID NO: 84691 - DNA, 24 bp, Homo sapiens
ctctctcgatttatttattttttt

SEQ ID NO: 84692 - DNA, 21 bp, Homo sapiens
tcatgaatgtacatagttaca

SEQ ID NO: 84693 - DNA, 22 bp, Homo sapiens
gaaaacaggggcccgaaaccca

SEQ ID NO: 84694 - DNA, 22 bp, Homo sapiens
acataccatttccagaaatgac

SEQ ID NO: 84695 - DNA, 17 bp, Homo sapiens
gtcacacatgccagaga

SEQ ID NO: 84696 - DNA, 22 bp, Homo sapiens
atcaatgctatctaactgatga

SEQ ID NO: 84697 - DNA, 19 bp, Homo sapiens
actacaaatgaaagagctc

SEQ ID NO: 84698 - DNA, 24 bp, Homo sapiens
aaataaaagtacatatacctaatc

SEQ ID NO: 84699 - DNA, 22 bp, Homo sapiens
tgtttaccaaaaatgtttgagt

SEQ ID NO: 84700 - DNA, 20 bp, Homo sapiens
actacagagttaatatttca

SEQ ID NO: 84701 - DNA, 18 bp, Homo sapiens
aggctctgctggttcttc

SEQ ID NO: 84702 - DNA, 21 bp, Homo sapiens
gtcaaataaaatacaaaacca

SEQ ID NO: 84703 - DNA, 18 bp, Homo sapiens
cattttgggagattaggt

SEQ ID NO: 84704 - DNA, 24 bp, Homo sapiens
ttattttctaaattgctgtgatac

SEQ ID NO: 84705 - DNA, 20 bp, Homo sapiens
ttttgtatttttgtcttgaa

SEQ ID NO: 84706 - DNA, 22 bp, Homo sapiens
gacactttgataactgtttctc

SEQ ID NO: 84707 - DNA, 16 bp, Homo sapiens
tctgtgctactaagca

SEQ ID NO: 84708 - DNA, 21 bp, Homo sapiens
tattcattatgggagaatgcc

SEQ ID NO: 84709 - DNA, 23 bp, Homo sapiens
cttaccttatttttaagaagaaa

SEQ ID NO: 84710 - DNA, 22 bp, Homo sapiens
agtaacaatgaactttatgtta

SEQ ID NO: 84711 - DNA, 18 bp, Homo sapiens
tctctcaccattaccatt

SEQ ID NO: 84712 - DNA, 17 bp, Homo sapiens
actagtcatcaaatgct

SEQ ID NO: 84713 - DNA, 17 bp, Homo sapiens
cattgggaggaaggaga

SEQ ID NO: 84714 - DNA, 20 bp, Homo sapiens
atctgcaggaataaatttct

SEQ ID NO: 84715 - DNA, 18 bp, Homo sapiens
aaaccttgtttgttctaa

SEQ ID NO: 84716 - DNA, 17 bp, Homo sapiens
accccgtaaaaaaggag

SEQ ID NO: 84717 - DNA, 18 bp, Homo sapiens
tgagaggagaggtttttt

SEQ ID NO: 84718 - DNA, 20 bp, Homo sapiens
ttcttcatgatccatggaca

SEQ ID NO: 84719 - DNA, 19 bp, Homo sapiens
gtttattcctcttggttgt

SEQ ID NO: 84720 - DNA, 16 bp, Homo sapiens
ccatagaggagttccc

SEQ ID NO: 84721 - DNA, 16 bp, Homo sapiens
aagttcctgtcacttt

SEQ ID NO: 84722 - DNA, 23 bp, Homo sapiens
tttaccaaatttcattcagaaaa

SEQ ID NO: 84723 - DNA, 17 bp, Homo sapiens
gtggaaataccagtcaa

SEQ ID NO: 84724 - DNA, 22 bp, Homo sapiens
atagaactagattctaagcagt

SEQ ID NO: 84725 - DNA, 23 bp, Homo sapiens
gagcctctctccggaagggaaaa

SEQ ID NO: 84726 - DNA, 24 bp, Homo sapiens
atgattaaaggaaaaagctcttgt

SEQ ID NO: 84727 - DNA, 16 bp, Homo sapiens
ctagtttggtctgggc

SEQ ID NO: 84728 - DNA, 16 bp, Homo sapiens
caggacatggcaacca

SEQ ID NO: 84729 - DNA, 19 bp, Homo sapiens
aaatatatgtcttccaccc

SEQ ID NO: 84730 - DNA, 18 bp, Homo sapiens
tgcactgacacttcatcc

SEQ ID NO: 84731 - DNA, 16 bp, Homo sapiens
tttgccgacaagccca

SEQ ID NO: 84732 - DNA, 21 bp, Homo sapiens
acctgttgacatcatattgct

SEQ ID NO: 84733 - DNA, 16 bp, Homo sapiens
tgacactgaagctgtt

SEQ ID NO: 84734 - DNA, 23 bp, Homo sapiens
aaaatcagatgccatgtgctttg

SEQ ID NO: 84735 - DNA, 17 bp, Homo sapiens
atccggtgtggggtgga

SEQ ID NO: 84736 - DNA, 18 bp, Homo sapiens
tacttgaatttcccctgt

SEQ ID NO: 84737 - DNA, 16 bp, Homo sapiens
ttcatggagtttgcct

SEQ ID NO: 84738 - DNA, 18 bp, Homo sapiens
cctttcctgtgaggttag

SEQ ID NO: 84739 - DNA, 16 bp, Homo sapiens
gcagtgggatgctcaa

SEQ ID NO: 84740 - DNA, 22 bp, Homo sapiens
tctgctcttcctactccttttg

SEQ ID NO: 84741 - DNA, 16 bp, Homo sapiens
ttgagggtgggcgcct

SEQ ID NO: 84742 - DNA, 21 bp, Homo sapiens
gtaacttgatttgctgttgta

SEQ ID NO: 84743 - DNA, 20 bp, Homo sapiens
cgtatcttggatttacttca

SEQ ID NO: 84744 - DNA, 17 bp, Homo sapiens
gatggcactgctgaggc

SEQ ID NO: 84745 - DNA, 19 bp, Homo sapiens
gccaagtttcaaacttgat

SEQ ID NO: 84746 - DNA, 19 bp, Homo sapiens
tgtgtgatcaggaatagct

SEQ ID NO: 84747 - DNA, 22 bp, Homo sapiens
gatagttaaggattagctttgt

SEQ ID NO: 84748 - DNA, 22 bp, Homo sapiens
tctgagtatttaatatacatca

SEQ ID NO: 84749 - DNA, 21 bp, Homo sapiens
cagttaacagacaaaagtcaa

SEQ ID NO: 84750 - DNA, 17 bp, Homo sapiens
aagttgctttcaagtga

SEQ ID NO: 84751 - DNA, 16 bp, Homo sapiens
ttactgagcgactctt

SEQ ID NO: 84752 - DNA, 18 bp, Homo sapiens
gggaacaagcaacaaagc

SEQ ID NO: 84753 - DNA, 20 bp, Homo sapiens
ccacattacaaagtacaggt

SEQ ID NO: 84754 - DNA, 22 bp, Homo sapiens
gatcagtggctctttaaaaatg

SEQ ID NO: 84755 - DNA, 18 bp, Homo sapiens
ctcacatgggacattcgc

SEQ ID NO: 84756 - DNA, 19 bp, Homo sapiens
tgtacttttgtcatggaag

SEQ ID NO: 84757 - DNA, 17 bp, Homo sapiens
ccagtcatgttgatcca

SEQ ID NO: 84758 - DNA, 22 bp, Homo sapiens
aactaattaaggtttaattcat

SEQ ID NO: 84759 - DNA, 17 bp, Homo sapiens
caggccagaattgcttc

SEQ ID NO: 84760 - DNA, 22 bp, Homo sapiens
cttcacaagaccattgttaaga

SEQ ID NO: 84761 - DNA, 21 bp, Homo sapiens
agacatcactgaaatcataga

SEQ ID NO: 84762 - DNA, 22 bp, Homo sapiens
tttgtctgacacagactcccta

SEQ ID NO: 84763 - DNA, 16 bp, Homo sapiens
ggacaacagccgatcc

SEQ ID NO: 84764 - DNA, 19 bp, Homo sapiens
ggagtgtgcctccagcaga

SEQ ID NO: 84765 - DNA, 20 bp, Homo sapiens
caccagatccttaacattgg

SEQ ID NO: 84766 - DNA, 19 bp, Homo sapiens
ccagtcagtgaacgtaagg

SEQ ID NO: 84767 - DNA, 19 bp, Homo sapiens
tgctgatggtattcttcaa

SEQ ID NO: 84768 - DNA, 22 bp, Homo sapiens
gatacacctgtcagcaaattta

SEQ ID NO: 84769 - DNA, 23 bp, Homo sapiens
attcatagagaaaggtgaaaaat

SEQ ID NO: 84770 - DNA, 19 bp, Homo sapiens
agtgggacttcaaatacgg

SEQ ID NO: 84771 - DNA, 20 bp, Homo sapiens
ctgtgagtacctaatttaaa

SEQ ID NO: 84772 - DNA, 18 bp, Homo sapiens
tccaatgctatttaacaa

SEQ ID NO: 84773 - DNA, 19 bp, Homo sapiens
gctgacccctacattgaga

SEQ ID NO: 84774 - DNA, 19 bp, Homo sapiens
gagtattggtatcagtcaa

SEQ ID NO: 84775 - DNA, 17 bp, Homo sapiens
tgtatgcttatttggct

SEQ ID NO: 84776 - DNA, 21 bp, Homo sapiens
ctgccttcagtatgattatct

SEQ ID NO: 84777 - DNA, 22 bp, Homo sapiens
tcagtcagtttcatctctctag

SEQ ID NO: 84778 - DNA, 18 bp, Homo sapiens
acctgaccagatttaaca

SEQ ID NO: 84779 - DNA, 20 bp, Homo sapiens
tttgttctttctttaggttt

SEQ ID NO: 84780 - DNA, 18 bp, Homo sapiens
tcagtgtgtaagaggttt

SEQ ID NO: 84781 - DNA, 18 bp, Homo sapiens
atgaagaacttgctagat

SEQ ID NO: 84782 - DNA, 21 bp, Homo sapiens
caagctagcattgaaacaatg

SEQ ID NO: 84783 - DNA, 16 bp, Homo sapiens
gcacacgaacatacct

SEQ ID NO: 84784 - DNA, 19 bp, Homo sapiens
tgtgtacgttcttttctaa

SEQ ID NO: 84785 - DNA, 18 bp, Homo sapiens
gccatcattacttcaact

SEQ ID NO: 84786 - DNA, 25 bp, Homo sapiens
tttacttgatgactaaagtatttag

SEQ ID NO: 84787 - DNA, 22 bp, Homo sapiens
ttttgagaactcacctaaattt

SEQ ID NO: 84788 - DNA, 24 bp, Homo sapiens
ttattgtttctatgtctatatagg

SEQ ID NO: 84789 - DNA, 21 bp, Homo sapiens
accgcatatctactctttttc

SEQ ID NO: 84790 - DNA, 17 bp, Homo sapiens
acgaaactgtgtcaatt

SEQ ID NO: 84791 - DNA, 23 bp, Homo sapiens
agagatgtagagaaaaacaaaca

SEQ ID NO: 84792 - DNA, 20 bp, Homo sapiens
tgccaagagatgaaatttag

SEQ ID NO: 84793 - DNA, 17 bp, Homo sapiens
acccagtctgtcaggta

SEQ ID NO: 84794 - DNA, 23 bp, Homo sapiens
aaagtcgtcatgtcacttaggtt

SEQ ID NO: 84795 - DNA, 21 bp, Homo sapiens
gtcattctttttttaccttgt

SEQ ID NO: 84796 - DNA, 19 bp, Homo sapiens
aaggtgtgtgtgtggcttc

SEQ ID NO: 84797 - DNA, 25 bp, Homo sapiens
caagtataaagctgtaattaagtag

SEQ ID NO: 84798 - DNA, 17 bp, Homo sapiens
agatggtagaatacctg

SEQ ID NO: 84799 - DNA, 20 bp, Homo sapiens
catatttcaaacacaaaagt

SEQ ID NO: 84800 - DNA, 23 bp, Homo sapiens
atgatgtaaaatgtcttacaagg

SEQ ID NO: 84801 - DNA, 23 bp, Homo sapiens
tctgggatctgcatattaactca

SEQ ID NO: 84802 - DNA, 18 bp, Homo sapiens
cagctagaagtgaaacta

SEQ ID NO: 84803 - DNA, 20 bp, Homo sapiens
agttcctaaggtttatatct

SEQ ID NO: 84804 - DNA, 18 bp, Homo sapiens
actgtgatttggcttcca

SEQ ID NO: 84805 - DNA, 18 bp, Homo sapiens
agattcatggtctctaaa

SEQ ID NO: 84806 - DNA, 17 bp, Homo sapiens
tggtggggggctttatt

SEQ ID NO: 84807 - DNA, 17 bp, Homo sapiens
aagcatggaagcagtag

SEQ ID NO: 84808 - DNA, 20 bp, Homo sapiens
acagttattttcctatccta

SEQ ID NO: 84809 - DNA, 18 bp, Homo sapiens
gtgtggaattgatggaag

SEQ ID NO: 84810 - DNA, 24 bp, Homo sapiens
aaaaggttcataaataatgtgaag

SEQ ID NO: 84811 - DNA, 17 bp, Homo sapiens
cgagagaggagagaaac

SEQ ID NO: 84812 - DNA, 16 bp, Homo sapiens
ttcctgccacctgttt

SEQ ID NO: 84813 - DNA, 24 bp, Homo sapiens
atatgattgttttggaatgtctgg

SEQ ID NO: 84814 - DNA, 17 bp, Homo sapiens
gtttgacattgcaagga

SEQ ID NO: 84815 - DNA, 20 bp, Homo sapiens
tttatttctcagatacttca

SEQ ID NO: 84816 - DNA, 21 bp, Homo sapiens
ctatatgaaactttcatttga

SEQ ID NO: 84817 - DNA, 18 bp, Homo sapiens
aagatgaaagtgcgcaaa

SEQ ID NO: 84818 - DNA, 21 bp, Homo sapiens
ttgctgaagtaatttttgctt

SEQ ID NO: 84819 - DNA, 19 bp, Homo sapiens
cactgaggcactgtacggt

SEQ ID NO: 84820 - DNA, 18 bp, Homo sapiens
ccttgtggtaacctaagc

SEQ ID NO: 84821 - DNA, 18 bp, Homo sapiens
ctcatgcactccataggt

SEQ ID NO: 84822 - DNA, 16 bp, Homo sapiens
gtgccttgttgaagga

SEQ ID NO: 84823 - DNA, 21 bp, Homo sapiens
gagaactggcatgtaagagaa

SEQ ID NO: 84824 - DNA, 18 bp, Homo sapiens
ccagttccaccaatctct

SEQ ID NO: 84825 - DNA, 21 bp, Homo sapiens
gcatctgtttgtccacattag

SEQ ID NO: 84826 - DNA, 16 bp, Homo sapiens
aaccacattggccaga

SEQ ID NO: 84827 - DNA, 20 bp, Homo sapiens
agttctgacaaaaatccttc

SEQ ID NO: 84828 - DNA, 16 bp, Homo sapiens
ctatgtgccaggcact

SEQ ID NO: 84829 - DNA, 17 bp, Homo sapiens
ctgatcggtttgagaga

SEQ ID NO: 84830 - DNA, 21 bp, Homo sapiens
tctggctctgaaattttatca

SEQ ID NO: 84831 - DNA, 16 bp, Homo sapiens
ccctatagcgatggct

SEQ ID NO: 84832 - DNA, 16 bp, Homo sapiens
gtggtgccaaccactt

SEQ ID NO: 84833 - DNA, 21 bp, Homo sapiens
atcataaacaatgtacactgt

SEQ ID NO: 84834 - DNA, 17 bp, Homo sapiens
gccgagaatcaaacaga

SEQ ID NO: 84835 - DNA, 23 bp, Homo sapiens
tttgccttaatttagcaagtggt

SEQ ID NO: 84836 - DNA, 19 bp, Homo sapiens
ggagtctgccaattctact

SEQ ID NO: 84837 - DNA, 23 bp, Homo sapiens
ttcctacctaagaataaaaatgg

SEQ ID NO: 84838 - DNA, 22 bp, Homo sapiens
ccttgaaacagaatgtcattat

SEQ ID NO: 84839 - DNA, 18 bp, Homo sapiens
ctagctcgagttctggtt

SEQ ID NO: 84840 - DNA, 24 bp, Homo sapiens
attctgtacataatcattacttga

SEQ ID NO: 84841 - DNA, 22 bp, Homo sapiens
ggaacatgttttctaaagaagt

SEQ ID NO: 84842 - DNA, 20 bp, Homo sapiens
agtttattatacctgctcca

SEQ ID NO: 84843 - DNA, 18 bp, Homo sapiens
cagcttggccagtaaaat

SEQ ID NO: 84844 - DNA, 18 bp, Homo sapiens
tccaggagtttttgtaga

SEQ ID NO: 84845 - DNA, 20 bp, Homo sapiens
tgtatgtgtgtgctgaggta

SEQ ID NO: 84846 - DNA, 17 bp, Homo sapiens
ggatccacttcaaagct

SEQ ID NO: 84847 - DNA, 24 bp, Homo sapiens
cttttaaggtaaaatatatggagc

SEQ ID NO: 84848 - DNA, 22 bp, Homo sapiens
acaaacaaacaaaaaaaaaaaa

SEQ ID NO: 84849 - DNA, 18 bp, Homo sapiens
atatggtgctacctatct

SEQ ID NO: 84850 - DNA, 22 bp, Homo sapiens
aattttaatgatcaaggggaga

SEQ ID NO: 84851 - DNA, 19 bp, Homo sapiens
cctctgattggcaacatgt

SEQ ID NO: 84852 - DNA, 22 bp, Homo sapiens
aaaaaaaattacagatatcatt

SEQ ID NO: 84853 - DNA, 26 bp, Homo sapiens
ttttttttttttatagttggttgttt

SEQ ID NO: 84854 - DNA, 20 bp, Homo sapiens
catggaagaacttttcagtc

SEQ ID NO: 84855 - DNA, 20 bp, Homo sapiens
aatgtctgtataagagtctc

SEQ ID NO: 84856 - DNA, 17 bp, Homo sapiens
cagtggcacacacttcg

SEQ ID NO: 84857 - DNA, 24 bp, Homo sapiens
caaaagtgttaggattttattttt

SEQ ID NO: 84858 - DNA, 22 bp, Homo sapiens
gcattcttcataatttaacttt

SEQ ID NO: 84859 - DNA, 20 bp, Homo sapiens
aaaccagcggaacctccttc

SEQ ID NO: 84860 - DNA, 20 bp, Homo sapiens
gactcagtattatagttaac

SEQ ID NO: 84861 - DNA, 16 bp, Homo sapiens
aattcccccctcaact

SEQ ID NO: 84862 - DNA, 25 bp, Homo sapiens
tatttaagtttttttcaaagacaat

SEQ ID NO: 84863 - DNA, 23 bp, Homo sapiens
aaaattaaaacccagaattaaaa

SEQ ID NO: 84864 - DNA, 23 bp, Homo sapiens
ttttttcttttactgtagcttta

SEQ ID NO: 84865 - DNA, 19 bp, Homo sapiens
tgttgattccatttgtgtt

SEQ ID NO: 84866 - DNA, 18 bp, Homo sapiens
tgctttgaaagaaacagc

SEQ ID NO: 84867 - DNA, 19 bp, Homo sapiens
gttgctgtatgtagtcggt

SEQ ID NO: 84868 - DNA, 18 bp, Homo sapiens
aggtcaaataggctgaag

SEQ ID NO: 84869 - DNA, 19 bp, Homo sapiens
cttgccactccctactgaa

SEQ ID NO: 84870 - DNA, 18 bp, Homo sapiens
ccagggttaattgaaatg

SEQ ID NO: 84871 - DNA, 23 bp, Homo sapiens
ttattttctcatgttttgggaga

SEQ ID NO: 84872 - DNA, 17 bp, Homo sapiens
tctgaggaacatggcac

SEQ ID NO: 84873 - DNA, 21 bp, Homo sapiens
attcagagtttttatgcaaag

SEQ ID NO: 84874 - DNA, 20 bp, Homo sapiens
tggtggctttttatctaaaa

SEQ ID NO: 84875 - DNA, 22 bp, Homo sapiens
cttatactcaattctcaactcc

SEQ ID NO: 84876 - DNA, 22 bp, Homo sapiens
taagatagctagattatcaaaa

SEQ ID NO: 84877 - DNA, 21 bp, Homo sapiens
cagaacagcatcggtgcagta

SEQ ID NO: 84878 - DNA, 22 bp, Homo sapiens
tgtaagaggaagtactgtaaga

SEQ ID NO: 84879 - DNA, 16 bp, Homo sapiens
atgaagcagggatttt

SEQ ID NO: 84880 - DNA, 27 bp, Homo sapiens
tttgtaatataaacaaataaaacaaaa

SEQ ID NO: 84881 - DNA, 17 bp, Homo sapiens
agagaacatgattggca

SEQ ID NO: 84882 - DNA, 24 bp, Homo sapiens
tttgatttttaagtactagcagaa

SEQ ID NO: 84883 - DNA, 17 bp, Homo sapiens
gcgtgctgcatcaaagt

SEQ ID NO: 84884 - DNA, 23 bp, Homo sapiens
tcttaatgtatagacttcataca

SEQ ID NO: 84885 - DNA, 19 bp, Homo sapiens
tgtgaaaccgaaaatattt

SEQ ID NO: 84886 - DNA, 17 bp, Homo sapiens
acttcagagtattgcca

SEQ ID NO: 84887 - DNA, 19 bp, Homo sapiens
gagcaggaaaagaaaaaaa

SEQ ID NO: 84888 - DNA, 20 bp, Homo sapiens
gcctttcaatgattttgtga

SEQ ID NO: 84889 - DNA, 19 bp, Homo sapiens
ttgctttgtctaatgtcaa

SEQ ID NO: 84890 - DNA, 21 bp, Homo sapiens
tgaaggaaagactatgattta

SEQ ID NO: 84891 - DNA, 19 bp, Homo sapiens
acttcacaaagttacttct

SEQ ID NO: 84892 - DNA, 17 bp, Homo sapiens
tttctcctgattgttcc

SEQ ID NO: 84893 - DNA, 21 bp, Homo sapiens
tggtgttgaaaattctaatga

SEQ ID NO: 84894 - DNA, 17 bp, Homo sapiens
acggagagtgttcacta

SEQ ID NO: 84895 - DNA, 17 bp, Homo sapiens
cctacaagtgatgcagt

SEQ ID NO: 84896 - DNA, 19 bp, Homo sapiens
ccaagaagatgcaaagtaa

SEQ ID NO: 84897 - DNA, 17 bp, Homo sapiens
tcgtctactctggaaca

SEQ ID NO: 84898 - DNA, 22 bp, Homo sapiens
aaccttttgtttgtattttttt

SEQ ID NO: 84899 - DNA, 21 bp, Homo sapiens
gaattattaatggattgaagt

SEQ ID NO: 84900 - DNA, 17 bp, Homo sapiens
agaagtgttgccatctt

SEQ ID NO: 84901 - DNA, 21 bp, Homo sapiens
acaaatcagctgacagtaaaa

SEQ ID NO: 84902 - DNA, 16 bp, Homo sapiens
aaggctggaccagtgt

SEQ ID NO: 84903 - DNA, 20 bp, Homo sapiens
actgctaattttttttctaa

SEQ ID NO: 84904 - DNA, 20 bp, Homo sapiens
atcaactatttcaaggttgt

SEQ ID NO: 84905 - DNA, 18 bp, Homo sapiens
ggaagacgaccttttgat

SEQ ID NO: 84906 - DNA, 22 bp, Homo sapiens
agtcttctatcatatctaacaa

SEQ ID NO: 84907 - DNA, 16 bp, Homo sapiens
tggcagatacacactg

SEQ ID NO: 84908 - DNA, 16 bp, Homo sapiens
ttggattccccaaaca

SEQ ID NO: 84909 - DNA, 17 bp, Homo sapiens
atttttggtgcatgttg

SEQ ID NO: 84910 - DNA, 27 bp, Homo sapiens
ttaaaatattttttcattttagtattt

SEQ ID NO: 84911 - DNA, 16 bp, Homo sapiens
acctccgtgcaacata

SEQ ID NO: 84912 - DNA, 19 bp, Homo sapiens
agacaacataaagcctcat

SEQ ID NO: 84913 - DNA, 20 bp, Homo sapiens
tgccatctctctatatttgc

SEQ ID NO: 84914 - DNA, 19 bp, Homo sapiens
agaattcaaggctttgaaa

SEQ ID NO: 84915 - DNA, 20 bp, Homo sapiens
gctcccaagtaaacttgtct

SEQ ID NO: 84916 - DNA, 23 bp, Homo sapiens
ccaaagctgggaatcctattttt

SEQ ID NO: 84917 - DNA, 19 bp, Homo sapiens
tgtccaaaaaacaactgat

SEQ ID NO: 84918 - DNA, 20 bp, Homo sapiens
taaagtcagtaagacatggt

SEQ ID NO: 84919 - DNA, 24 bp, Homo sapiens
ttctctctagaaaatgaatcataa

SEQ ID NO: 84920 - DNA, 18 bp, Homo sapiens
gcccggtatgggtaaggt

SEQ ID NO: 84921 - DNA, 22 bp, Homo sapiens
acactgctaataatctttgtct

SEQ ID NO: 84922 - DNA, 18 bp, Homo sapiens
gcaaagccaggaaaaaca

SEQ ID NO: 84923 - DNA, 20 bp, Homo sapiens
caaatcaatggtgatttgct

SEQ ID NO: 84924 - DNA, 19 bp, Homo sapiens
ttggtgtactccctgaccc

SEQ ID NO: 84925 - DNA, 22 bp, Homo sapiens
caaagccatatgaaattgtagt

SEQ ID NO: 84926 - DNA, 19 bp, Homo sapiens
ctatgaaaacaagcctttt

SEQ ID NO: 84927 - DNA, 22 bp, Homo sapiens
cagactttctctctaagtggtt

SEQ ID NO: 84928 - DNA, 17 bp, Homo sapiens
cagcaggtagtttctgt

SEQ ID NO: 84929 - DNA, 20 bp, Homo sapiens
atctataactgtaactcctg

SEQ ID NO: 84930 - DNA, 16 bp, Homo sapiens
tctttgtgagctagct

SEQ ID NO: 84931 - DNA, 18 bp, Homo sapiens
ggcctcaaaggtagcaaa

SEQ ID NO: 84932 - DNA, 22 bp, Homo sapiens
gtcaagaaaagcaatgaatcgt

SEQ ID NO: 84933 - DNA, 20 bp, Homo sapiens
gagcacatagagcatgaaca

SEQ ID NO: 84934 - DNA, 16 bp, Homo sapiens
acaccactataggggt

SEQ ID NO: 84935 - DNA, 24 bp, Homo sapiens
gaaggtattccacaatgctctcaa

SEQ ID NO: 84936 - DNA, 16 bp, Homo sapiens
cccaaagtgcttggat

SEQ ID NO: 84937 - DNA, 26 bp, Homo sapiens
tgagaacatttatcataataattact

SEQ ID NO: 84938 - DNA, 19 bp, Homo sapiens
ccctaggacttttgttcgc

SEQ ID NO: 84939 - DNA, 20 bp, Homo sapiens
tagtgttttgtttggttggt

SEQ ID NO: 84940 - DNA, 19 bp, Homo sapiens
ctaggcagatttcttcaat

SEQ ID NO: 84941 - DNA, 17 bp, Homo sapiens
attcttctccacttcac

SEQ ID NO: 84942 - DNA, 16 bp, Homo sapiens
gtgcatgaaggtgagc

SEQ ID NO: 84943 - DNA, 23 bp, Homo sapiens
ctgctgtccaagtaacttcagca

SEQ ID NO: 84944 - DNA, 17 bp, Homo sapiens
gacagttcccagcgggt

SEQ ID NO: 84945 - DNA, 23 bp, Homo sapiens
atttattatgcttcggaaattga

SEQ ID NO: 84946 - DNA, 16 bp, Homo sapiens
gtcccagggacatctt

SEQ ID NO: 84947 - DNA, 17 bp, Homo sapiens
ccattgcaaaccagggc

SEQ ID NO: 84948 - DNA, 17 bp, Homo sapiens
aaaacctaccgtaaact

SEQ ID NO: 84949 - DNA, 18 bp, Homo sapiens
atcattcatatccggacc

SEQ ID NO: 84950 - DNA, 23 bp, Homo sapiens
ttaaaattcattaaatggtctca

SEQ ID NO: 84951 - DNA, 16 bp, Homo sapiens
caccaagattcggcca

SEQ ID NO: 84952 - DNA, 16 bp, Homo sapiens
acagtggttaaccaac

SEQ ID NO: 84953 - DNA, 21 bp, Homo sapiens
aatttaggcagttctgacccg

SEQ ID NO: 84954 - DNA, 25 bp, Homo sapiens
tttggttttactgtagaattataac

SEQ ID NO: 84955 - DNA, 22 bp, Homo sapiens
ggccctcgatttttaaattaaa

SEQ ID NO: 84956 - DNA, 19 bp, Homo sapiens
actttgtaacagaatcaca

SEQ ID NO: 84957 - DNA, 18 bp, Homo sapiens
agacaataaagagggtgt

SEQ ID NO: 84958 - DNA, 24 bp, Homo sapiens
aggaaaaatacgttttaaaacaac

SEQ ID NO: 84959 - DNA, 22 bp, Homo sapiens
acactcttccaaaaattctaac

SEQ ID NO: 84960 - DNA, 18 bp, Homo sapiens
ctgtgtgccttaacttgt

SEQ ID NO: 84961 - DNA, 27 bp, Homo sapiens
cttagaataattgttagtattaaagaa

SEQ ID NO: 84962 - DNA, 17 bp, Homo sapiens
atgtatccctgccaaca

SEQ ID NO: 84963 - DNA, 17 bp, Homo sapiens
aagtcttcactggaaaa

SEQ ID NO: 84964 - DNA, 18 bp, Homo sapiens
ccaatgagccacacctca

SEQ ID NO: 84965 - DNA, 20 bp, Homo sapiens
tccttcagttacaggatacc

SEQ ID NO: 84966 - DNA, 18 bp, Homo sapiens
ggccacattgagaaatcc

SEQ ID NO: 84967 - DNA, 21 bp, Homo sapiens
caaagtcaacctaaagaaaag

SEQ ID NO: 84968 - DNA, 16 bp, Homo sapiens
acacacctctggacca

SEQ ID NO: 84969 - DNA, 16 bp, Homo sapiens
gtgccactgtgctctc

SEQ ID NO: 84970 - DNA, 20 bp, Homo sapiens
agcttcagcatttctcttca

SEQ ID NO: 84971 - DNA, 21 bp, Homo sapiens
tcgcctctacaaaaatatatt

SEQ ID NO: 84972 - DNA, 19 bp, Homo sapiens
actagatttgacagccatg

SEQ ID NO: 84973 - DNA, 21 bp, Homo sapiens
taccttttaccattttttccc

SEQ ID NO: 84974 - DNA, 17 bp, Homo sapiens
gcttgtcaagaatagca

SEQ ID NO: 84975 - DNA, 18 bp, Homo sapiens
cattgaccatcacatgct

SEQ ID NO: 84976 - DNA, 17 bp, Homo sapiens
tccccatatttttgctt

SEQ ID NO: 84977 - DNA, 21 bp, Homo sapiens
tttgtttggaatacatgactc

SEQ ID NO: 84978 - DNA, 18 bp, Homo sapiens
tgtgcacaaaggagatac

SEQ ID NO: 84979 - DNA, 24 bp, Homo sapiens
tgatgatgccaaacgacaaagagt

SEQ ID NO: 84980 - DNA, 18 bp, Homo sapiens
ttttacaactctatccct

SEQ ID NO: 84981 - DNA, 19 bp, Homo sapiens
aaaaacagatgtacccatc

SEQ ID NO: 84982 - DNA, 20 bp, Homo sapiens
aaccagatgaagagctgggt

SEQ ID NO: 84983 - DNA, 22 bp, Homo sapiens
aataaattgtatttactgacag

SEQ ID NO: 84984 - DNA, 20 bp, Homo sapiens
tggttttgatgaaactgtct

SEQ ID NO: 84985 - DNA, 25 bp, Homo sapiens
tcaggtaaaatagaattttcatatt

SEQ ID NO: 84986 - DNA, 19 bp, Homo sapiens
caaagctacagcagtatct

SEQ ID NO: 84987 - DNA, 23 bp, Homo sapiens
attggtagagtgattaaaaacat

SEQ ID NO: 84988 - DNA, 20 bp, Homo sapiens
gctatagtacagaaggcaaa

SEQ ID NO: 84989 - DNA, 20 bp, Homo sapiens
ctgcttgatgttgtactaga

SEQ ID NO: 84990 - DNA, 23 bp, Homo sapiens
aaagttcagtttaatttaaaagt

SEQ ID NO: 84991 - DNA, 19 bp, Homo sapiens
taaaagctgaggtgatggc

SEQ ID NO: 84992 - DNA, 21 bp, Homo sapiens
agaagcaggattttttttttt

SEQ ID NO: 84993 - DNA, 19 bp, Homo sapiens
tttcaagcaaggtaatcac

SEQ ID NO: 84994 - DNA, 18 bp, Homo sapiens
gagataagcatgtcttgt

SEQ ID NO: 84995 - DNA, 20 bp, Homo sapiens
aggaggttttttgttttgta

SEQ ID NO: 84996 - DNA, 19 bp, Homo sapiens
tcagcatgtagcgtgctaa

SEQ ID NO: 84997 - DNA, 17 bp, Homo sapiens
ttgagtcccatgttttt

SEQ ID NO: 84998 - DNA, 16 bp, Homo sapiens
gtggaagaggtaggga

SEQ ID NO: 84999 - DNA, 21 bp, Homo sapiens
aaggatgtgcaaaataattga

SEQ ID NO: 85000 - DNA, 16 bp, Homo sapiens
catgtgtggaagctct

SEQ ID NO: 85001 - DNA, 19 bp, Homo sapiens
gtgggatgatattgctatt

SEQ ID NO: 85002 - DNA, 21 bp, Homo sapiens
gaacttaccactaaaatgaag

SEQ ID NO: 85003 - DNA, 20 bp, Homo sapiens
attcccttgatgtggcagct

SEQ ID NO: 85004 - DNA, 17 bp, Homo sapiens
ttgatcaggtgaagtaa

SEQ ID NO: 85005 - DNA, 18 bp, Homo sapiens
acaggtccgctctccctt

SEQ ID NO: 85006 - DNA, 18 bp, Homo sapiens
tgtcattactggaggctt

SEQ ID NO: 85007 - DNA, 16 bp, Homo sapiens
acttgttcacagcttc

SEQ ID NO: 85008 - DNA, 19 bp, Homo sapiens
actctgtcagactgagtct

SEQ ID NO: 85009 - DNA, 20 bp, Homo sapiens
agggaacatgattatgtaat

SEQ ID NO: 85010 - DNA, 18 bp, Homo sapiens
gcagctgacttgactttg

SEQ ID NO: 85011 - DNA, 22 bp, Homo sapiens
aacatggaactttagaaattaa

SEQ ID NO: 85012 - DNA, 19 bp, Homo sapiens
tctcataggagccaggaga

SEQ ID NO: 85013 - DNA, 22 bp, Homo sapiens
tcttacagaagagaccaagcaa

SEQ ID NO: 85014 - DNA, 18 bp, Homo sapiens
acctccatgatctccaac

SEQ ID NO: 85015 - DNA, 17 bp, Homo sapiens
acttgctgtttggcatt

SEQ ID NO: 85016 - DNA, 28 bp, Homo sapiens
ttctatatagtattaacatatttttaaa

SEQ ID NO: 85017 - DNA, 18 bp, Homo sapiens
accgggacaggtcattct

SEQ ID NO: 85018 - DNA, 22 bp, Homo sapiens
tttttatttaagcattaagtac

SEQ ID NO: 85019 - DNA, 20 bp, Homo sapiens
ccttggaaacagtcacagaa

SEQ ID NO: 85020 - DNA, 22 bp, Homo sapiens
tttattgtgctattttgtactt

SEQ ID NO: 85021 - DNA, 21 bp, Homo sapiens
acatacctttgagctagttct

SEQ ID NO: 85022 - DNA, 18 bp, Homo sapiens
aggtcacttaatgacatc

SEQ ID NO: 85023 - DNA, 19 bp, Homo sapiens
aatagctgtattttcaaca

SEQ ID NO: 85024 - DNA, 22 bp, Homo sapiens
tgtacaatatgtattcagagta

SEQ ID NO: 85025 - DNA, 21 bp, Homo sapiens
aacttataaaaacctttgtgt

SEQ ID NO: 85026 - DNA, 19 bp, Homo sapiens
tgcaagtggctggaccagt

SEQ ID NO: 85027 - DNA, 16 bp, Homo sapiens
ggttgcagggatggat

SEQ ID NO: 85028 - DNA, 22 bp, Homo sapiens
tgtaaaaatatgcatattgttg

SEQ ID NO: 85029 - DNA, 18 bp, Homo sapiens
tctgctttatctgcccat

SEQ ID NO: 85030 - DNA, 28 bp, Homo sapiens
ttattatttagtatatataaacacaaag

SEQ ID NO: 85031 - DNA, 21 bp, Homo sapiens
tgagaaccataaatatttggg

SEQ ID NO: 85032 - DNA, 22 bp, Homo sapiens
gcagatttgcattccaatataa

SEQ ID NO: 85033 - DNA, 19 bp, Homo sapiens
tttcattgacctcaaattt

SEQ ID NO: 85034 - DNA, 16 bp, Homo sapiens
agcaaacgagtgtctc

SEQ ID NO: 85035 - DNA, 24 bp, Homo sapiens
tcttcaaagaattacaataaataa

SEQ ID NO: 85036 - DNA, 19 bp, Homo sapiens
aatgtacattaagctagct

SEQ ID NO: 85037 - DNA, 17 bp, Homo sapiens
tcagaacttgactgttg

SEQ ID NO: 85038 - DNA, 25 bp, Homo sapiens
ttattaaataagtaaatgttcctga

SEQ ID NO: 85039 - DNA, 25 bp, Homo sapiens
ttttctatacagtaattaccttatt

SEQ ID NO: 85040 - DNA, 22 bp, Homo sapiens
ttatttcaatgaaagtaaaata

SEQ ID NO: 85041 - DNA, 20 bp, Homo sapiens
tttctaaactctttgaaaga

SEQ ID NO: 85042 - DNA, 16 bp, Homo sapiens
ggacctgacacttaca

SEQ ID NO: 85043 - DNA, 22 bp, Homo sapiens
ttaagaggttctactttaacta

SEQ ID NO: 85044 - DNA, 22 bp, Homo sapiens
aaattacagccacttcttaata

SEQ ID NO: 85045 - DNA, 24 bp, Homo sapiens
cagtgtctttagttatacatatgg

SEQ ID NO: 85046 - DNA, 16 bp, Homo sapiens
cagccacagctaccca

SEQ ID NO: 85047 - DNA, 19 bp, Homo sapiens
acatgggtaatttaggaag

SEQ ID NO: 85048 - DNA, 18 bp, Homo sapiens
tgcaggttttgttcaaga

SEQ ID NO: 85049 - DNA, 18 bp, Homo sapiens
agactatgtcatgattca

SEQ ID NO: 85050 - DNA, 16 bp, Homo sapiens
acctcaaggcaaagtt

SEQ ID NO: 85051 - DNA, 17 bp, Homo sapiens
ctgcacaaagccctctt

SEQ ID NO: 85052 - DNA, 23 bp, Homo sapiens
ttgtgattttaaaagaatagcaa

SEQ ID NO: 85053 - DNA, 16 bp, Homo sapiens
tcagcaggtaccgcac

SEQ ID NO: 85054 - DNA, 19 bp, Homo sapiens
ggtaaggaaatatactcac

SEQ ID NO: 85055 - DNA, 19 bp, Homo sapiens
aatgttctgtggttttctg

SEQ ID NO: 85056 - DNA, 16 bp, Homo sapiens
gcttgcagtgccactc

SEQ ID NO: 85057 - DNA, 22 bp, Homo sapiens
attacttatcttgtcatactat

SEQ ID NO: 85058 - DNA, 17 bp, Homo sapiens
ggtgtccaaccaatgca

SEQ ID NO: 85059 - DNA, 16 bp, Homo sapiens
gaacctcatcaaccat

SEQ ID NO: 85060 - DNA, 22 bp, Homo sapiens
tacttctggtttcttaatagta

SEQ ID NO: 85061 - DNA, 17 bp, Homo sapiens
ccggaatcctctggagt

SEQ ID NO: 85062 - DNA, 18 bp, Homo sapiens
agacataagggctaactt

SEQ ID NO: 85063 - DNA, 21 bp, Homo sapiens
aatttcaactctaactttaac

SEQ ID NO: 85064 - DNA, 19 bp, Homo sapiens
gcctcccaaaatgttggta

SEQ ID NO: 85065 - DNA, 17 bp, Homo sapiens
cattcacatatgcatgt

SEQ ID NO: 85066 - DNA, 17 bp, Homo sapiens
tgactgttcttgcaaca

SEQ ID NO: 85067 - DNA, 18 bp, Homo sapiens
tttcctttccttgcagag

SEQ ID NO: 85068 - DNA, 21 bp, Homo sapiens
ttcacttcaaatttgtcacaa

SEQ ID NO: 85069 - DNA, 24 bp, Homo sapiens
tgcttgttcaaaaaattaattctt

SEQ ID NO: 85070 - DNA, 24 bp, Homo sapiens
agatgtagcaagattaattttgtt

SEQ ID NO: 85071 - DNA, 19 bp, Homo sapiens
ggcatccttcacctgctat

SEQ ID NO: 85072 - DNA, 17 bp, Homo sapiens
cgcaaccgccaaaaaac

SEQ ID NO: 85073 - DNA, 21 bp, Homo sapiens
caaacacagaaattgtgacaa

SEQ ID NO: 85074 - DNA, 20 bp, Homo sapiens
ggcaaaactctcaaaattgt

SEQ ID NO: 85075 - DNA, 23 bp, Homo sapiens
agatgcttattaaatctctctgt

SEQ ID NO: 85076 - DNA, 18 bp, Homo sapiens
tgttttaggctgcagcga

SEQ ID NO: 85077 - DNA, 17 bp, Homo sapiens
aacaggtactatgctct

SEQ ID NO: 85078 - DNA, 21 bp, Homo sapiens
tgggatatgtatccataggaa

SEQ ID NO: 85079 - DNA, 24 bp, Homo sapiens
cacacttgtgatttgttaaatttt

SEQ ID NO: 85080 - DNA, 25 bp, Homo sapiens
cttgattatgattatgtaattatag

SEQ ID NO: 85081 - DNA, 20 bp, Homo sapiens
tctgaagaagttcgaagtcg

SEQ ID NO: 85082 - DNA, 20 bp, Homo sapiens
cccatgttaccttctagatt

SEQ ID NO: 85083 - DNA, 21 bp, Homo sapiens
atttcaatggaaaatgttcct

SEQ ID NO: 85084 - DNA, 26 bp, Homo sapiens
ataaaataccacacatttataaaatg

SEQ ID NO: 85085 - DNA, 19 bp, Homo sapiens
taattcctagggatacacc

SEQ ID NO: 85086 - DNA, 18 bp, Homo sapiens
ccttcagaacctttggga

SEQ ID NO: 85087 - DNA, 21 bp, Homo sapiens
aaattaattgattgctgttgt

SEQ ID NO: 85088 - DNA, 16 bp, Homo sapiens
atttcctggctcgggg

SEQ ID NO: 85089 - DNA, 20 bp, Homo sapiens
gttgtatttgtcaccatatt

SEQ ID NO: 85090 - DNA, 20 bp, Homo sapiens
tttagataaactaaccaagc

SEQ ID NO: 85091 - DNA, 17 bp, Homo sapiens
gagactcagccatggtc

SEQ ID NO: 85092 - DNA, 22 bp, Homo sapiens
tcaaataattttccaagagtaa

SEQ ID NO: 85093 - DNA, 16 bp, Homo sapiens
ctgtcggccagaccag

SEQ ID NO: 85094 - DNA, 19 bp, Homo sapiens
gcatcaaaaactttgctac

SEQ ID NO: 85095 - DNA, 18 bp, Homo sapiens
ctcaggccaacactaaga

SEQ ID NO: 85096 - DNA, 23 bp, Homo sapiens
agaagatggaaaataaaggaaag

SEQ ID NO: 85097 - DNA, 16 bp, Homo sapiens
ggagcctttgtgtctg

SEQ ID NO: 85098 - DNA, 22 bp, Homo sapiens
gtcctcagtgaaagcttaaaca

SEQ ID NO: 85099 - DNA, 16 bp, Homo sapiens
tctgctactctcctca

SEQ ID NO: 85100 - DNA, 18 bp, Homo sapiens
agacactgtagttaatga

SEQ ID NO: 85101 - DNA, 17 bp, Homo sapiens
ctctcccaccttatttt

SEQ ID NO: 85102 - DNA, 19 bp, Homo sapiens
tgatcacttgatatcagac

SEQ ID NO: 85103 - DNA, 24 bp, Homo sapiens
tctatatttcactctaaagattct

SEQ ID NO: 85104 - DNA, 17 bp, Homo sapiens
acaccccccaaaatgag

SEQ ID NO: 85105 - DNA, 19 bp, Homo sapiens
acacaagcttcaagataac

SEQ ID NO: 85106 - DNA, 20 bp, Homo sapiens
gctgttgtgatgaggaaatc

SEQ ID NO: 85107 - DNA, 21 bp, Homo sapiens
tctatgatgtttatgttagta

SEQ ID NO: 85108 - DNA, 18 bp, Homo sapiens
acttcttcatccaagaga

SEQ ID NO: 85109 - DNA, 24 bp, Homo sapiens
gaagtaacattgaaatagttaggt

SEQ ID NO: 85110 - DNA, 19 bp, Homo sapiens
aaaaggggaaatccttact

SEQ ID NO: 85111 - DNA, 17 bp, Homo sapiens
gctgcagaaactcagag

SEQ ID NO: 85112 - DNA, 20 bp, Homo sapiens
gtttttaatatttaagggcc

SEQ ID NO: 85113 - DNA, 19 bp, Homo sapiens
gtctgaatcaaatgttctc

SEQ ID NO: 85114 - DNA, 18 bp, Homo sapiens
actttgtggctgaattgt

SEQ ID NO: 85115 - DNA, 20 bp, Homo sapiens
cgctgcttcttactgttcta

SEQ ID NO: 85116 - DNA, 20 bp, Homo sapiens
ggtatattttaccagtgtag

SEQ ID NO: 85117 - DNA, 19 bp, Homo sapiens
attccagtctacttttagg

SEQ ID NO: 85118 - DNA, 18 bp, Homo sapiens
tgggaaacacaacactgg

SEQ ID NO: 85119 - DNA, 17 bp, Homo sapiens
acttctcacccaaacag

SEQ ID NO: 85120 - DNA, 17 bp, Homo sapiens
ggcacgaaggtgaatta

SEQ ID NO: 85121 - DNA, 20 bp, Homo sapiens
cttttttgcatcttggcagg

SEQ ID NO: 85122 - DNA, 16 bp, Homo sapiens
cattttgccctctttg

SEQ ID NO: 85123 - DNA, 20 bp, Homo sapiens
ttatgaatacttagcagagg

SEQ ID NO: 85124 - DNA, 20 bp, Homo sapiens
aggtcaaaactaatcttaac

SEQ ID NO: 85125 - DNA, 20 bp, Homo sapiens
ttggaaaatgaagaaatgcc

SEQ ID NO: 85126 - DNA, 20 bp, Homo sapiens
acaaatttggatcttggcac

SEQ ID NO: 85127 - DNA, 22 bp, Homo sapiens
ttttggcacattattctgggga

SEQ ID NO: 85128 - DNA, 19 bp, Homo sapiens
gtggtggggattcttcatg

SEQ ID NO: 85129 - DNA, 19 bp, Homo sapiens
tctaaaatgttcctctgtt

SEQ ID NO: 85130 - DNA, 19 bp, Homo sapiens
gcaagttcatcaaccatcc

SEQ ID NO: 85131 - DNA, 24 bp, Homo sapiens
tctaagatcaacaccctgttatca

SEQ ID NO: 85132 - DNA, 24 bp, Homo sapiens
acaagtctatcccttataaagaat

SEQ ID NO: 85133 - DNA, 18 bp, Homo sapiens
tgtgcagagtgtggtgta

SEQ ID NO: 85134 - DNA, 18 bp, Homo sapiens
tggacatacagttgagag

SEQ ID NO: 85135 - DNA, 21 bp, Homo sapiens
gctgagtatattttaagtagg

SEQ ID NO: 85136 - DNA, 18 bp, Homo sapiens
cctttgaaaacggtcctg

SEQ ID NO: 85137 - DNA, 19 bp, Homo sapiens
tcaacatgtacatagggtt

SEQ ID NO: 85138 - DNA, 18 bp, Homo sapiens
ggcatactaatttgaaca

SEQ ID NO: 85139 - DNA, 19 bp, Homo sapiens
aaaagataccttgcttgtt

SEQ ID NO: 85140 - DNA, 19 bp, Homo sapiens
acatatgtgtttattgtga

SEQ ID NO: 85141 - DNA, 18 bp, Homo sapiens
atggcttgtggcggtttg

SEQ ID NO: 85142 - DNA, 18 bp, Homo sapiens
aatattactccactcccc

SEQ ID NO: 85143 - DNA, 18 bp, Homo sapiens
gtacgtgtcaatcaaggc

SEQ ID NO: 85144 - DNA, 22 bp, Homo sapiens
ttaagtccaaacaaaattaata

SEQ ID NO: 85145 - DNA, 17 bp, Homo sapiens
agatgtgggagtcagga

SEQ ID NO: 85146 - DNA, 26 bp, Homo sapiens
aaaaaaaggaactaaaataatttcct

SEQ ID NO: 85147 - DNA, 18 bp, Homo sapiens
catggaattagaaaggtt

SEQ ID NO: 85148 - DNA, 22 bp, Homo sapiens
tgagcttattgttaagtttctt

SEQ ID NO: 85149 - DNA, 24 bp, Homo sapiens
ctcaaagtcatataaagatcacat

SEQ ID NO: 85150 - DNA, 16 bp, Homo sapiens
gaagaatccctcctga

SEQ ID NO: 85151 - DNA, 23 bp, Homo sapiens
gcaaaatttgctataaactgatc

SEQ ID NO: 85152 - DNA, 16 bp, Homo sapiens
gtatcactgccaacct

SEQ ID NO: 85153 - DNA, 19 bp, Homo sapiens
gtcaagtcagttacaaggt

SEQ ID NO: 85154 - DNA, 21 bp, Homo sapiens
gtagtaggctatgctatctaa

SEQ ID NO: 85155 - DNA, 16 bp, Homo sapiens
gccagtggtaggggag

SEQ ID NO: 85156 - DNA, 24 bp, Homo sapiens
aaaatcgcctaatgattgtttcct

SEQ ID NO: 85157 - DNA, 17 bp, Homo sapiens
cagcgcttctttgcttc

SEQ ID NO: 85158 - DNA, 16 bp, Homo sapiens
tcagtcctggaaggaa

SEQ ID NO: 85159 - DNA, 17 bp, Homo sapiens
aaaagaaagcaagcaag

SEQ ID NO: 85160 - DNA, 21 bp, Homo sapiens
ggagaacgttgaactctcccc

SEQ ID NO: 85161 - DNA, 17 bp, Homo sapiens
atggggggaaagggcaa

SEQ ID NO: 85162 - DNA, 19 bp, Homo sapiens
ggatccgcaagccaagtgc

SEQ ID NO: 85163 - DNA, 16 bp, Homo sapiens
gcaacatggcaaaccg

SEQ ID NO: 85164 - DNA, 19 bp, Homo sapiens
taagaagatcgtgtgaagc

SEQ ID NO: 85165 - DNA, 20 bp, Homo sapiens
gcttacagagagtgaggcca

SEQ ID NO: 85166 - DNA, 24 bp, Homo sapiens
agacattgggacctgggggacctc

SEQ ID NO: 85167 - DNA, 16 bp, Homo sapiens
gtagtcaccagtgcca

SEQ ID NO: 85168 - DNA, 16 bp, Homo sapiens
cactgactccttactt

SEQ ID NO: 85169 - DNA, 23 bp, Homo sapiens
ggaggggtccccaatgcttccct

SEQ ID NO: 85170 - DNA, 16 bp, Homo sapiens
actctttagaggctga

SEQ ID NO: 85171 - DNA, 24 bp, Homo sapiens
ctgtaatgtggcactctgctctga

SEQ ID NO: 85172 - DNA, 21 bp, Homo sapiens
ggaagatgccagtaatcttgg

SEQ ID NO: 85173 - DNA, 22 bp, Homo sapiens
ggaaacctgttggctggaagaa

SEQ ID NO: 85174 - DNA, 21 bp, Homo sapiens
gagcatcaggcggccggcgca

SEQ ID NO: 85175 - DNA, 19 bp, Homo sapiens
ctttagttgcaaggtttca

SEQ ID NO: 85176 - DNA, 17 bp, Homo sapiens
ctggagctttgtgccca

SEQ ID NO: 85177 - DNA, 24 bp, Homo sapiens
ggtatggaaaccaccctccagggc

SEQ ID NO: 85178 - DNA, 17 bp, Homo sapiens
caggtgaccaaccacat

SEQ ID NO: 85179 - DNA, 16 bp, Homo sapiens
ttggccagacacgcca

SEQ ID NO: 85180 - DNA, 23 bp, Homo sapiens
agcggtagtaatcgatgtcctct

SEQ ID NO: 85181 - DNA, 21 bp, Homo sapiens
gtccaggagaatccgagtgct

SEQ ID NO: 85182 - DNA, 17 bp, Homo sapiens
gtaaccttggggaagtt

SEQ ID NO: 85183 - DNA, 22 bp, Homo sapiens
cctcccgctgtccctgtctcga

SEQ ID NO: 85184 - DNA, 24 bp, Homo sapiens
tgattcccttagctatttatggtg

SEQ ID NO: 85185 - DNA, 24 bp, Homo sapiens
tggccttgatgatgcagctggccc

SEQ ID NO: 85186 - DNA, 23 bp, Homo sapiens
ctaaagggccactttggggttca

SEQ ID NO: 85187 - DNA, 16 bp, Homo sapiens
tccctggttccccact

SEQ ID NO: 85188 - DNA, 19 bp, Homo sapiens
tagaaatcaagttcattgg

SEQ ID NO: 85189 - DNA, 24 bp, Homo sapiens
gcagagcctggggccagtggaatg

SEQ ID NO: 85190 - DNA, 21 bp, Homo sapiens
ggtcccgggccagggtcttca

SEQ ID NO: 85191 - DNA, 16 bp, Homo sapiens
gtggtttccccacttc

SEQ ID NO: 85192 - DNA, 18 bp, Homo sapiens
gaggagaagcagagaggg

SEQ ID NO: 85193 - DNA, 24 bp, Homo sapiens
acattccttcaggtgactggttct

SEQ ID NO: 85194 - DNA, 22 bp, Homo sapiens
gactccagagctgggaggcgag

SEQ ID NO: 85195 - DNA, 24 bp, Homo sapiens
atagaaaagcaagcttgtcctgta

SEQ ID NO: 85196 - DNA, 18 bp, Homo sapiens
ctctgctgacctcccaga

SEQ ID NO: 85197 - DNA, 16 bp, Homo sapiens
gtgcagcttgctgtat

SEQ ID NO: 85198 - DNA, 18 bp, Homo sapiens
cttcacagttcctgaaga

SEQ ID NO: 85199 - DNA, 24 bp, Homo sapiens
tatgtgatttaggtgctcgggaat

SEQ ID NO: 85200 - DNA, 21 bp, Homo sapiens
gcatttgacatcttccagatg

SEQ ID NO: 85201 - DNA, 20 bp, Homo sapiens
tctgcatttccaaacagtct

SEQ ID NO: 85202 - DNA, 21 bp, Homo sapiens
tccttgcttttcttttccacc

SEQ ID NO: 85203 - DNA, 21 bp, Homo sapiens
agaaagctgaattaagcaagg

SEQ ID NO: 85204 - DNA, 16 bp, Homo sapiens
ctcttccttctcagcc

SEQ ID NO: 85205 - DNA, 16 bp, Homo sapiens
ctcctgcagcacatcc

SEQ ID NO: 85206 - DNA, 20 bp, Homo sapiens
gtgacaactgaccattagac

SEQ ID NO: 85207 - DNA, 16 bp, Homo sapiens
ggagagcttctgcctg

SEQ ID NO: 85208 - DNA, 18 bp, Homo sapiens
gcatcaacaggggtggct

SEQ ID NO: 85209 - DNA, 18 bp, Homo sapiens
tgacagcttcccgcctcc

SEQ ID NO: 85210 - DNA, 17 bp, Homo sapiens
aaggcaaggaatgacta

SEQ ID NO: 85211 - DNA, 17 bp, Homo sapiens
cagcaaatgtggcccat

SEQ ID NO: 85212 - DNA, 22 bp, Homo sapiens
ttttcctgtgtcagaatctcaa

SEQ ID NO: 85213 - DNA, 20 bp, Homo sapiens
ctctctgaagtgtcaagttc

SEQ ID NO: 85214 - DNA, 20 bp, Homo sapiens
tgggttttagcctgaagcag

SEQ ID NO: 85215 - DNA, 21 bp, Homo sapiens
gactcagcccatttgtgttgc

SEQ ID NO: 85216 - DNA, 19 bp, Homo sapiens
taggacgttttgctgcagg

SEQ ID NO: 85217 - DNA, 17 bp, Homo sapiens
cgtactaatgggttcag

SEQ ID NO: 85218 - DNA, 20 bp, Homo sapiens
ctgaaattgtaggaggccca

SEQ ID NO: 85219 - DNA, 16 bp, Homo sapiens
atcttctctctgttgg

SEQ ID NO: 85220 - DNA, 17 bp, Homo sapiens
cttctgccatcagtctt

SEQ ID NO: 85221 - DNA, 20 bp, Homo sapiens
cctgggctatgcatctacca

SEQ ID NO: 85222 - DNA, 18 bp, Homo sapiens
cttttcttcttggtacct

SEQ ID NO: 85223 - DNA, 23 bp, Homo sapiens
ctgagttttgccgctacctgggc

SEQ ID NO: 85224 - DNA, 17 bp, Homo sapiens
gagaagcctcctggcca

SEQ ID NO: 85225 - DNA, 22 bp, Homo sapiens
accagcatcaagcagtttatca

SEQ ID NO: 85226 - DNA, 19 bp, Homo sapiens
aggacagtctcgatttcct

SEQ ID NO: 85227 - DNA, 21 bp, Homo sapiens
aacagatggactttcgctgaa

SEQ ID NO: 85228 - DNA, 24 bp, Homo sapiens
aaagtgctgtgatcacaggcgtga

SEQ ID NO: 85229 - DNA, 20 bp, Homo sapiens
gggagatcgtggagtggggt

SEQ ID NO: 85230 - DNA, 21 bp, Homo sapiens
cattggtggttgtgacgaata

SEQ ID NO: 85231 - DNA, 16 bp, Homo sapiens
tggagggcgcactcaa

SEQ ID NO: 85232 - DNA, 16 bp, Homo sapiens
gttcatcgaaagcatt

SEQ ID NO: 85233 - DNA, 16 bp, Homo sapiens
agtggtgaacaggaag

SEQ ID NO: 85234 - DNA, 18 bp, Homo sapiens
tcttcagagcattcctga

SEQ ID NO: 85235 - DNA, 18 bp, Homo sapiens
aggggaaaatcaagtgaa

SEQ ID NO: 85236 - DNA, 24 bp, Homo sapiens
ctgcagtcctcccaggttcccact

SEQ ID NO: 85237 - DNA, 16 bp, Homo sapiens
aggaactgaagacctc

SEQ ID NO: 85238 - DNA, 22 bp, Homo sapiens
atccattattggttaaaaaaaa

SEQ ID NO: 85239 - DNA, 17 bp, Homo sapiens
ctgaggcgggtgctgct

SEQ ID NO: 85240 - DNA, 24 bp, Homo sapiens
ctgagaggaggccccatcctcctg

SEQ ID NO: 85241 - DNA, 16 bp, Homo sapiens
cttctacgggcaattt

SEQ ID NO: 85242 - DNA, 16 bp, Homo sapiens
agtggacaggatggca

SEQ ID NO: 85243 - DNA, 18 bp, Homo sapiens
ggagcagagggttctcag

SEQ ID NO: 85244 - DNA, 19 bp, Homo sapiens
cggggaaagccgagaactg

SEQ ID NO: 85245 - DNA, 20 bp, Homo sapiens
aatctgggcgacagagtgag

SEQ ID NO: 85246 - DNA, 17 bp, Homo sapiens
aggtagctcagaaatgt

SEQ ID NO: 85247 - DNA, 22 bp, Homo sapiens
cagctggcttgggatggacttt

SEQ ID NO: 85248 - DNA, 18 bp, Homo sapiens
tagaattgacaccccatt

SEQ ID NO: 85249 - DNA, 19 bp, Homo sapiens
ttgtaagacaagccacatt

SEQ ID NO: 85250 - DNA, 16 bp, Homo sapiens
ggctcctgcagctttg

SEQ ID NO: 85251 - DNA, 23 bp, Homo sapiens
gatgatccagcttctcaggagcc

SEQ ID NO: 85252 - DNA, 21 bp, Homo sapiens
gaagcgcggccctctaggaat

SEQ ID NO: 85253 - DNA, 23 bp, Homo sapiens
ccggcctgcggggaacatgggcg

SEQ ID NO: 85254 - DNA, 22 bp, Homo sapiens
ctcggggcctgcccaggttgtg

SEQ ID NO: 85255 - DNA, 16 bp, Homo sapiens
agaggaccccccgcga

SEQ ID NO: 85256 - DNA, 22 bp, Homo sapiens
gtcacctgtcttgatcctgtgg

SEQ ID NO: 85257 - DNA, 16 bp, Homo sapiens
tctcctccggcagcca

SEQ ID NO: 85258 - DNA, 24 bp, Homo sapiens
ccagggcacagtccgaccctgagc

SEQ ID NO: 85259 - DNA, 16 bp, Homo sapiens
ggtgactgactgagcc

SEQ ID NO: 85260 - DNA, 17 bp, Homo sapiens
ccaccaacagatcccat

SEQ ID NO: 85261 - DNA, 19 bp, Homo sapiens
tgatatggacaagaaaaaa

SEQ ID NO: 85262 - DNA, 16 bp, Homo sapiens
aggaaggaaccagtga

SEQ ID NO: 85263 - DNA, 24 bp, Homo sapiens
aaaccaaaaaacattttttcatta

SEQ ID NO: 85264 - DNA, 16 bp, Homo sapiens
aggcacgtctactcct

SEQ ID NO: 85265 - DNA, 18 bp, Homo sapiens
ttttctcatcttctggta

SEQ ID NO: 85266 - DNA, 17 bp, Homo sapiens
gtgtgattacagaggag

SEQ ID NO: 85267 - DNA, 17 bp, Homo sapiens
ccgagccagtgttacta

SEQ ID NO: 85268 - DNA, 18 bp, Homo sapiens
cagctgtatactgtcagc

SEQ ID NO: 85269 - DNA, 21 bp, Homo sapiens
cccactctccttgtcctcagg

SEQ ID NO: 85270 - DNA, 17 bp, Homo sapiens
tggttcatttcaggggt

SEQ ID NO: 85271 - DNA, 19 bp, Homo sapiens
cttcaaggtgtgtctcctc

SEQ ID NO: 85272 - DNA, 24 bp, Homo sapiens
taaaatactgaatgtcaatatcat

SEQ ID NO: 85273 - DNA, 18 bp, Homo sapiens
aagaacaagcagctaaca

SEQ ID NO: 85274 - DNA, 18 bp, Homo sapiens
cagaatacttgcacttag

SEQ ID NO: 85275 - DNA, 16 bp, Homo sapiens
gggagaaggaggccgc

SEQ ID NO: 85276 - DNA, 16 bp, Homo sapiens
cctctgcgtttgttgc

SEQ ID NO: 85277 - DNA, 18 bp, Homo sapiens
gagaaaattgcagctgag

SEQ ID NO: 85278 - DNA, 17 bp, Homo sapiens
ttctcctcgcctttgtt

SEQ ID NO: 85279 - DNA, 16 bp, Homo sapiens
attacggagttctgtt

SEQ ID NO: 85280 - DNA, 16 bp, Homo sapiens
cagcttgctctgcggc

SEQ ID NO: 85281 - DNA, 17 bp, Homo sapiens
taggcaagaaaaccaac

SEQ ID NO: 85282 - DNA, 17 bp, Homo sapiens
cctctgcctgtgcaatc

SEQ ID NO: 85283 - DNA, 18 bp, Homo sapiens
ccacatttttttggcaca

SEQ ID NO: 85284 - DNA, 20 bp, Homo sapiens
tcctggaaagcacagattca

SEQ ID NO: 85285 - DNA, 24 bp, Homo sapiens
taaagttagccctgtttcaaagtg

SEQ ID NO: 85286 - DNA, 19 bp, Homo sapiens
agcgaaaactagaagctga

SEQ ID NO: 85287 - DNA, 20 bp, Homo sapiens
ggaaaaataaagtaacaggt

SEQ ID NO: 85288 - DNA, 17 bp, Homo sapiens
tttgaaagtatggacca

SEQ ID NO: 85289 - DNA, 24 bp, Homo sapiens
acccttttaagttcattgttaaat

SEQ ID NO: 85290 - DNA, 19 bp, Homo sapiens
cttagctagactcatgtga

SEQ ID NO: 85291 - DNA, 22 bp, Homo sapiens
ggtgtcgttcctctatttgaag

SEQ ID NO: 85292 - DNA, 16 bp, Homo sapiens
tcaaacggcaggtcca

SEQ ID NO: 85293 - DNA, 22 bp, Homo sapiens
caaatcaggaacaggttagatt

SEQ ID NO: 85294 - DNA, 18 bp, Homo sapiens
ttagtgagagtgtggtgc

SEQ ID NO: 85295 - DNA, 24 bp, Homo sapiens
aatcatatcacctgggatttgtgg

SEQ ID NO: 85296 - DNA, 16 bp, Homo sapiens
atgaagcatacagcca

SEQ ID NO: 85297 - DNA, 17 bp, Homo sapiens
aaccattaaggactgga

SEQ ID NO: 85298 - DNA, 16 bp, Homo sapiens
tactggtgacctgatt

SEQ ID NO: 85299 - DNA, 16 bp, Homo sapiens
gaccgaacgtctggca

SEQ ID NO: 85300 - DNA, 17 bp, Homo sapiens
ccagtgagggccatagt

SEQ ID NO: 85301 - DNA, 24 bp, Homo sapiens
tttctctggaaacgggcggtggct

SEQ ID NO: 85302 - DNA, 21 bp, Homo sapiens
ggtttttatcaagtaactgcc

SEQ ID NO: 85303 - DNA, 21 bp, Homo sapiens
ttcacatacaaatcttactca

SEQ ID NO: 85304 - DNA, 18 bp, Homo sapiens
gcatggagaaaggagaac

SEQ ID NO: 85305 - DNA, 22 bp, Homo sapiens
cttttccatttaggataagaaa

SEQ ID NO: 85306 - DNA, 17 bp, Homo sapiens
aaatgcaaaaagtcgtg

SEQ ID NO: 85307 - DNA, 19 bp, Homo sapiens
cacagagaaagcataaaca

SEQ ID NO: 85308 - DNA, 19 bp, Homo sapiens
ttcagatagagtacaatga

SEQ ID NO: 85309 - DNA, 17 bp, Homo sapiens
gctcatgtacggttctc

SEQ ID NO: 85310 - DNA, 20 bp, Homo sapiens
agataacataggtctgcatt

SEQ ID NO: 85311 - DNA, 17 bp, Homo sapiens
aagcagcttctgcacga

SEQ ID NO: 85312 - DNA, 22 bp, Homo sapiens
ctgtaaaaaggagataattatc

SEQ ID NO: 85313 - DNA, 22 bp, Homo sapiens
atgataggccttcatagattca

SEQ ID NO: 85314 - DNA, 16 bp, Homo sapiens
aactgacttgactcag

SEQ ID NO: 85315 - DNA, 16 bp, Homo sapiens
gtggcatgtggcgaga

SEQ ID NO: 85316 - DNA, 24 bp, Homo sapiens
caaatcttatgttacttttataaa

SEQ ID NO: 85317 - DNA, 16 bp, Homo sapiens
aggtctgggaccaagt

SEQ ID NO: 85318 - DNA, 17 bp, Homo sapiens
tcccactgtgagcccct

SEQ ID NO: 85319 - DNA, 23 bp, Homo sapiens
tttttaaaggtctatacgtttag

SEQ ID NO: 85320 - DNA, 17 bp, Homo sapiens
catcagtgagatctcgc

SEQ ID NO: 85321 - DNA, 24 bp, Homo sapiens
acctagaaatttgatactgttttc

SEQ ID NO: 85322 - DNA, 16 bp, Homo sapiens
agggttggaagccttt

SEQ ID NO: 85323 - DNA, 19 bp, Homo sapiens
cagaactaattgctttaaa

SEQ ID NO: 85324 - DNA, 16 bp, Homo sapiens
aaacccccaaagccac

SEQ ID NO: 85325 - DNA, 22 bp, Homo sapiens
atatgcacagaaaagctggcta

SEQ ID NO: 85326 - DNA, 18 bp, Homo sapiens
aactccttacagttgaat

SEQ ID NO: 85327 - DNA, 20 bp, Homo sapiens
gacagtgtcctcactcctta

SEQ ID NO: 85328 - DNA, 16 bp, Homo sapiens
gaagaaaggcgcatta

SEQ ID NO: 85329 - DNA, 17 bp, Homo sapiens
agcggcttatctggtgg

SEQ ID NO: 85330 - DNA, 24 bp, Homo sapiens
cattttcttttgaacatttctgaa

SEQ ID NO: 85331 - DNA, 19 bp, Homo sapiens
ctgggagggaacccgggca

SEQ ID NO: 85332 - DNA, 25 bp, Homo sapiens
aaaaagctaggttaaaaaatttttt

SEQ ID NO: 85333 - DNA, 16 bp, Homo sapiens
ccagcacaccagggtt

SEQ ID NO: 85334 - DNA, 19 bp, Homo sapiens
ctgaaggcatttctggtca

SEQ ID NO: 85335 - DNA, 18 bp, Homo sapiens
cgtttgagctcatttctc

SEQ ID NO: 85336 - DNA, 17 bp, Homo sapiens
cgtgacccggctgttgg

SEQ ID NO: 85337 - DNA, 19 bp, Homo sapiens
tttaaattcaggttgcttt

SEQ ID NO: 85338 - DNA, 16 bp, Homo sapiens
tggattgtatcccaca

SEQ ID NO: 85339 - DNA, 22 bp, Homo sapiens
aaggaaagatgcaaataattat

SEQ ID NO: 85340 - DNA, 22 bp, Homo sapiens
tcaaacagaaagaccatcttat

SEQ ID NO: 85341 - DNA, 19 bp, Homo sapiens
catcctgttgctgtgatga

SEQ ID NO: 85342 - DNA, 21 bp, Homo sapiens
tggtagttttgttgcatagta

SEQ ID NO: 85343 - DNA, 16 bp, Homo sapiens
aaggccagagttggct

SEQ ID NO: 85344 - DNA, 16 bp, Homo sapiens
gccctagcaagtggga

SEQ ID NO: 85345 - DNA, 17 bp, Homo sapiens
ctggggtgggaggtggg

SEQ ID NO: 85346 - DNA, 23 bp, Homo sapiens
cttgtaaacaactgagatataat

SEQ ID NO: 85347 - DNA, 24 bp, Homo sapiens
cttttttttttattttagtgtctc

SEQ ID NO: 85348 - DNA, 19 bp, Homo sapiens
aaaatgagagtattttgga

SEQ ID NO: 85349 - DNA, 21 bp, Homo sapiens
accctattcattaggaaaaca

SEQ ID NO: 85350 - DNA, 25 bp, Homo sapiens
catagattgataaatataaaaattg

SEQ ID NO: 85351 - DNA, 17 bp, Homo sapiens
ctgcagccagccacagg

SEQ ID NO: 85352 - DNA, 18 bp, Homo sapiens
cagaagtccttttcaggc

SEQ ID NO: 85353 - DNA, 16 bp, Homo sapiens
ctctaccagtgccagg

SEQ ID NO: 85354 - DNA, 23 bp, Homo sapiens
agaaggactgaagagtgagagga

SEQ ID NO: 85355 - DNA, 17 bp, Homo sapiens
attgggcagatgtgtga

SEQ ID NO: 85356 - DNA, 16 bp, Homo sapiens
gtcctgtggctctgta

SEQ ID NO: 85357 - DNA, 22 bp, Homo sapiens
gagcctagtccaggagaatgaa

SEQ ID NO: 85358 - DNA, 18 bp, Homo sapiens
ggtatcaggtaggtgtcc

SEQ ID NO: 85359 - DNA, 21 bp, Homo sapiens
gcttctacctcattaatccta

SEQ ID NO: 85360 - DNA, 21 bp, Homo sapiens
ctcgggtcaccacaggtgcct

SEQ ID NO: 85361 - DNA, 16 bp, Homo sapiens
ctctagcctcggcgac

SEQ ID NO: 85362 - DNA, 17 bp, Homo sapiens
aggtgcctgcatgtacc

SEQ ID NO: 85363 - DNA, 22 bp, Homo sapiens
caaataacaataaaaacatcaa

SEQ ID NO: 85364 - DNA, 19 bp, Homo sapiens
gggtgtccacccaattgtg

SEQ ID NO: 85365 - DNA, 17 bp, Homo sapiens
ccaagaactgtgctact

SEQ ID NO: 85366 - DNA, 17 bp, Homo sapiens
gacagttccagtagtcc

SEQ ID NO: 85367 - DNA, 20 bp, Homo sapiens
ccatatagcacaggtacatg

SEQ ID NO: 85368 - DNA, 17 bp, Homo sapiens
atgtgcagttctcaaat

SEQ ID NO: 85369 - DNA, 16 bp, Homo sapiens
ggtgaaggagctttca

SEQ ID NO: 85370 - DNA, 21 bp, Homo sapiens
tatgtgggcagagaagacttc

SEQ ID NO: 85371 - DNA, 22 bp, Homo sapiens
tgattttacatctaaatgtcca

SEQ ID NO: 85372 - DNA, 19 bp, Homo sapiens
cagtcttgctcacaggaga

SEQ ID NO: 85373 - DNA, 22 bp, Homo sapiens
aagccttcatccggagagtgta

SEQ ID NO: 85374 - DNA, 23 bp, Homo sapiens
cttactgtgccaagggtgaatga

SEQ ID NO: 85375 - DNA, 16 bp, Homo sapiens
gaccattgtcctttgg

SEQ ID NO: 85376 - DNA, 19 bp, Homo sapiens
atccattccagttgatcta

SEQ ID NO: 85377 - DNA, 23 bp, Homo sapiens
aggataacatttaggtgctgttt

SEQ ID NO: 85378 - DNA, 18 bp, Homo sapiens
cagatcttcagggggcta

SEQ ID NO: 85379 - DNA, 23 bp, Homo sapiens
gaacatttcagcaatctgaggaa

SEQ ID NO: 85380 - DNA, 22 bp, Homo sapiens
tataactagattttccttctct

SEQ ID NO: 85381 - DNA, 17 bp, Homo sapiens
caaaggctggtgctgga

SEQ ID NO: 85382 - DNA, 18 bp, Homo sapiens
aaagaaaagctcttcctt

SEQ ID NO: 85383 - DNA, 18 bp, Homo sapiens
gcccatagcaacagattt

SEQ ID NO: 85384 - DNA, 19 bp, Homo sapiens
gacattggactgcttgtcc

SEQ ID NO: 85385 - DNA, 20 bp, Homo sapiens
tatgtggttgggatggaaga

SEQ ID NO: 85386 - DNA, 19 bp, Homo sapiens
caatggaagaaaccaccaa

SEQ ID NO: 85387 - DNA, 26 bp, Homo sapiens
gtatgtatgtaataagtcttacaaaa

SEQ ID NO: 85388 - DNA, 22 bp, Homo sapiens
atcctgatgggttgtgtttggt

SEQ ID NO: 85389 - DNA, 21 bp, Homo sapiens
cagagtggtggggtgagattt

SEQ ID NO: 85390 - DNA, 18 bp, Homo sapiens
gccttaaatatgacgtgt

SEQ ID NO: 85391 - DNA, 18 bp, Homo sapiens
ttctcttgctcgctttgg

SEQ ID NO: 85392 - DNA, 16 bp, Homo sapiens
gcctcagtctcccaaa

SEQ ID NO: 85393 - DNA, 21 bp, Homo sapiens
ttcaaaatcatgctgaaagaa

SEQ ID NO: 85394 - DNA, 20 bp, Homo sapiens
cgctgggattataggtatga

SEQ ID NO: 85395 - DNA, 19 bp, Homo sapiens
gtgacccagtctattaaag

SEQ ID NO: 85396 - DNA, 20 bp, Homo sapiens
tggaaaatttgtgcattgtt

SEQ ID NO: 85397 - DNA, 17 bp, Homo sapiens
tgaaaagagcacgttct

SEQ ID NO: 85398 - DNA, 21 bp, Homo sapiens
ttttaactatatgactgaatg

SEQ ID NO: 85399 - DNA, 18 bp, Homo sapiens
ggacctctcctctgtcat

SEQ ID NO: 85400 - DNA, 19 bp, Homo sapiens
ttcagcatttttctttctt

SEQ ID NO: 85401 - DNA, 17 bp, Homo sapiens
tgtctccagaaggaaac

SEQ ID NO: 85402 - DNA, 18 bp, Homo sapiens
caccagcttatctgaaca

SEQ ID NO: 85403 - DNA, 16 bp, Homo sapiens
aggaattgcgggagga

SEQ ID NO: 85404 - DNA, 22 bp, Homo sapiens
aattaaagaccttttggtaact

SEQ ID NO: 85405 - DNA, 20 bp, Homo sapiens
ttgagtgtttttcattctgc

SEQ ID NO: 85406 - DNA, 20 bp, Homo sapiens
ggtgtaaaaatgcaattctg

SEQ ID NO: 85407 - DNA, 18 bp, Homo sapiens
aggctctttagcttctta

SEQ ID NO: 85408 - DNA, 21 bp, Homo sapiens
acagaaatagctaactaccca

SEQ ID NO: 85409 - DNA, 16 bp, Homo sapiens
tgtcaccaggggtttt

SEQ ID NO: 85410 - DNA, 16 bp, Homo sapiens
caaactcagcatctgc

SEQ ID NO: 85411 - DNA, 20 bp, Homo sapiens
tgcccgcctcggcctcccaa

SEQ ID NO: 85412 - DNA, 24 bp, Homo sapiens
gaatatttgatttaatttcagatg

SEQ ID NO: 85413 - DNA, 21 bp, Homo sapiens
cctcatgtggttttatgcagc

SEQ ID NO: 85414 - DNA, 21 bp, Homo sapiens
tgccatggtggaataactagt

SEQ ID NO: 85415 - DNA, 23 bp, Homo sapiens
cataacaacatgagtagtctctt

SEQ ID NO: 85416 - DNA, 19 bp, Homo sapiens
tcactttaaatagttccag

SEQ ID NO: 85417 - DNA, 16 bp, Homo sapiens
tgtacacgagcatctg

SEQ ID NO: 85418 - DNA, 18 bp, Homo sapiens
aatttgtgagtgtatcca

SEQ ID NO: 85419 - DNA, 24 bp, Homo sapiens
taaattttcagaaattagtaatcg

SEQ ID NO: 85420 - DNA, 19 bp, Homo sapiens
tcaacagaaagggtcaaca

SEQ ID NO: 85421 - DNA, 24 bp, Homo sapiens
cttcctctaggttattaattgaca

SEQ ID NO: 85422 - DNA, 17 bp, Homo sapiens
actgctgggtataatgc

SEQ ID NO: 85423 - DNA, 22 bp, Homo sapiens
taagtcttagtcattagggaga

SEQ ID NO: 85424 - DNA, 18 bp, Homo sapiens
tccccaattgaaagttgc

SEQ ID NO: 85425 - DNA, 19 bp, Homo sapiens
atggacattcttttgttga

SEQ ID NO: 85426 - DNA, 17 bp, Homo sapiens
gacagagccccagagtc

SEQ ID NO: 85427 - DNA, 18 bp, Homo sapiens
cctgctcacactttcttc

SEQ ID NO: 85428 - DNA, 17 bp, Homo sapiens
cccttacctggaatctg

SEQ ID NO: 85429 - DNA, 17 bp, Homo sapiens
ctgggcagattctgcaa

SEQ ID NO: 85430 - DNA, 22 bp, Homo sapiens
ttgtaattcaacattcatcgtt

SEQ ID NO: 85431 - DNA, 16 bp, Homo sapiens
tgttgccaacacgagc

SEQ ID NO: 85432 - DNA, 20 bp, Homo sapiens
acccatttttctcttaacct

SEQ ID NO: 85433 - DNA, 21 bp, Homo sapiens
cagggtcatcagagaagaggc

SEQ ID NO: 85434 - DNA, 23 bp, Homo sapiens
ccatatttcctttttaggaaact

SEQ ID NO: 85435 - DNA, 23 bp, Homo sapiens
agtaaaccttgattaacacttga

SEQ ID NO: 85436 - DNA, 16 bp, Homo sapiens
gccacacgatttgacg

SEQ ID NO: 85437 - DNA, 24 bp, Homo sapiens
caaaagtgtccatgatagactagt

SEQ ID NO: 85438 - DNA, 19 bp, Homo sapiens
ccatctcaagaggagctca

SEQ ID NO: 85439 - DNA, 22 bp, Homo sapiens
attcagagtaaaatcaaagtgt

SEQ ID NO: 85440 - DNA, 22 bp, Homo sapiens
tcattagatgataggtggtaca

SEQ ID NO: 85441 - DNA, 22 bp, Homo sapiens
ccttggcaagtaagatgtttcc

SEQ ID NO: 85442 - DNA, 22 bp, Homo sapiens
caattggtggcgatggttttct

SEQ ID NO: 85443 - DNA, 19 bp, Homo sapiens
tccacatcaacaaccttaa

SEQ ID NO: 85444 - DNA, 17 bp, Homo sapiens
tgacatgagctgtttca

SEQ ID NO: 85445 - DNA, 20 bp, Homo sapiens
cccagagcaactgtgcatgt

SEQ ID NO: 85446 - DNA, 20 bp, Homo sapiens
caacatgaatccagacttct

SEQ ID NO: 85447 - DNA, 22 bp, Homo sapiens
aggttcaaaaaacctatatagg

SEQ ID NO: 85448 - DNA, 19 bp, Homo sapiens
tgcagatagttctaccagt

SEQ ID NO: 85449 - DNA, 20 bp, Homo sapiens
tgtataaatgcctgtatgca

SEQ ID NO: 85450 - DNA, 16 bp, Homo sapiens
taccctataagccaga

SEQ ID NO: 85451 - DNA, 22 bp, Homo sapiens
tataaataaagatgtcagatac

SEQ ID NO: 85452 - DNA, 22 bp, Homo sapiens
agtaaagtagatttgttttctc

SEQ ID NO: 85453 - DNA, 18 bp, Homo sapiens
ccactcctggttctttat

SEQ ID NO: 85454 - DNA, 22 bp, Homo sapiens
tatcatagattgatgcttttga

SEQ ID NO: 85455 - DNA, 17 bp, Homo sapiens
gccttctggattctggc

SEQ ID NO: 85456 - DNA, 22 bp, Homo sapiens
gcattgcttgtgtttataaaat

SEQ ID NO: 85457 - DNA, 19 bp, Homo sapiens
actgctttaaatggaatga

SEQ ID NO: 85458 - DNA, 16 bp, Homo sapiens
ggtgcctctcctcttt

SEQ ID NO: 85459 - DNA, 20 bp, Homo sapiens
tacagattcgcatatacatg

SEQ ID NO: 85460 - DNA, 17 bp, Homo sapiens
aaaaagtcattcctcct

SEQ ID NO: 85461 - DNA, 19 bp, Homo sapiens
gcattcctttttgaacagt

SEQ ID NO: 85462 - DNA, 16 bp, Homo sapiens
cagcatgctgggtcac

SEQ ID NO: 85463 - DNA, 19 bp, Homo sapiens
tgctcaatacgcacattaa

SEQ ID NO: 85464 - DNA, 18 bp, Homo sapiens
cttgggtccctctgactg

SEQ ID NO: 85465 - DNA, 17 bp, Homo sapiens
ctgcgaaatccagaaca

SEQ ID NO: 85466 - DNA, 16 bp, Homo sapiens
catgtgctgagcaagg

SEQ ID NO: 85467 - DNA, 16 bp, Homo sapiens
tgggagccagccttct

SEQ ID NO: 85468 - DNA, 22 bp, Homo sapiens
aaggagataaaggggaaggaaa

SEQ ID NO: 85469 - DNA, 22 bp, Homo sapiens
accatgcaacataacctgataa

SEQ ID NO: 85470 - DNA, 17 bp, Homo sapiens
ctgatgtgctttgttct

SEQ ID NO: 85471 - DNA, 21 bp, Homo sapiens
gcttctcaaagtatttcattt

SEQ ID NO: 85472 - DNA, 16 bp, Homo sapiens
ggaagggtagctgtta

SEQ ID NO: 85473 - DNA, 19 bp, Homo sapiens
gatttcaattcctgtgcta

SEQ ID NO: 85474 - DNA, 20 bp, Homo sapiens
gttcagccatttcctgctgg

SEQ ID NO: 85475 - DNA, 21 bp, Homo sapiens
ggcattaattgcatgaatgtg

SEQ ID NO: 85476 - DNA, 20 bp, Homo sapiens
tatgagttccatcaaggtgc

SEQ ID NO: 85477 - DNA, 16 bp, Homo sapiens
actgctcagggctatc

SEQ ID NO: 85478 - DNA, 19 bp, Homo sapiens
tgccattaattcaaagaga

SEQ ID NO: 85479 - DNA, 22 bp, Homo sapiens
tttttgttatttaaggtgaagc

SEQ ID NO: 85480 - DNA, 16 bp, Homo sapiens
atgcaaaggacaccac

SEQ ID NO: 85481 - DNA, 17 bp, Homo sapiens
gaaaaagacacagcaag

SEQ ID NO: 85482 - DNA, 17 bp, Homo sapiens
aaaatgtcactctgaga

SEQ ID NO: 85483 - DNA, 20 bp, Homo sapiens
cccaaagcaaggaatttaat

SEQ ID NO: 85484 - DNA, 16 bp, Homo sapiens
cacccagatgctgctt

SEQ ID NO: 85485 - DNA, 21 bp, Homo sapiens
gatgacgtcctagctgtgtga

SEQ ID NO: 85486 - DNA, 17 bp, Homo sapiens
tcaagaagagcaaagca

SEQ ID NO: 85487 - DNA, 24 bp, Homo sapiens
catgtttcaagtttaagaagcagt

SEQ ID NO: 85488 - DNA, 17 bp, Homo sapiens
ctgagtgacaaggaatt

SEQ ID NO: 85489 - DNA, 21 bp, Homo sapiens
aaagcataaacatttagctca

SEQ ID NO: 85490 - DNA, 19 bp, Homo sapiens
ttcttgattggttcttcca

SEQ ID NO: 85491 - DNA, 19 bp, Homo sapiens
cctaagtttgaatccatgc

SEQ ID NO: 85492 - DNA, 17 bp, Homo sapiens
tttcttcacagtgcagt

SEQ ID NO: 85493 - DNA, 21 bp, Homo sapiens
cctctttcttcatcatctgaa

SEQ ID NO: 85494 - DNA, 16 bp, Homo sapiens
gcaaaggcatctcagg

SEQ ID NO: 85495 - DNA, 17 bp, Homo sapiens
tgcctcatttgtttgga

SEQ ID NO: 85496 - DNA, 21 bp, Homo sapiens
aagaacacagaggagaattta

SEQ ID NO: 85497 - DNA, 23 bp, Homo sapiens
atttgcagtcaagtcttccaatt

SEQ ID NO: 85498 - DNA, 20 bp, Homo sapiens
aaacaatataccttctcagt

SEQ ID NO: 85499 - DNA, 21 bp, Homo sapiens
cctcactaaggtgatgttcct

SEQ ID NO: 85500 - DNA, 19 bp, Homo sapiens
agaacttatctagtgagga

SEQ ID NO: 85501 - DNA, 19 bp, Homo sapiens
ttaagctattcttcaatga

SEQ ID NO: 85502 - DNA, 17 bp, Homo sapiens
acatttggctcagggtt

SEQ ID NO: 85503 - DNA, 22 bp, Homo sapiens
tagcaacggtgctatgcctagt

SEQ ID NO: 85504 - DNA, 16 bp, Homo sapiens
tttagcaaaagcgtcc

SEQ ID NO: 85505 - DNA, 20 bp, Homo sapiens
gtgttggaagcagggaagct

SEQ ID NO: 85506 - DNA, 22 bp, Homo sapiens
tgttagatgatggtgaaataaa

SEQ ID NO: 85507 - DNA, 22 bp, Homo sapiens
tttcttggcccctcttcggtaa

SEQ ID NO: 85508 - DNA, 17 bp, Homo sapiens
cctatgggaagtagtca

SEQ ID NO: 85509 - DNA, 16 bp, Homo sapiens
tctcctttctggacgc

SEQ ID NO: 85510 - DNA, 21 bp, Homo sapiens
gaagaagtagttcagactgtt

SEQ ID NO: 85511 - DNA, 19 bp, Homo sapiens
tcagcaaaactagtatctt

SEQ ID NO: 85512 - DNA, 19 bp, Homo sapiens
acaaagtcttcctggaagt

SEQ ID NO: 85513 - DNA, 24 bp, Homo sapiens
gtgtctcagaacaaacctgagatg

SEQ ID NO: 85514 - DNA, 18 bp, Homo sapiens
gagggccaaaattgaatg

SEQ ID NO: 85515 - DNA, 18 bp, Homo sapiens
tggagagaaatctgtatt

SEQ ID NO: 85516 - DNA, 18 bp, Homo sapiens
tgggctccagtattaatg

SEQ ID NO: 85517 - DNA, 19 bp, Homo sapiens
tttcaggatgcttacaatt

SEQ ID NO: 85518 - DNA, 16 bp, Homo sapiens
aaagaagccagctcaa

SEQ ID NO: 85519 - DNA, 19 bp, Homo sapiens
ctaatctaagcatagcatt

SEQ ID NO: 85520 - DNA, 21 bp, Homo sapiens
gaaatgagaacattccaagta

SEQ ID NO: 85521 - DNA, 19 bp, Homo sapiens
gttttcatcactggaacct

SEQ ID NO: 85522 - DNA, 21 bp, Homo sapiens
aagaaaaatctgctagaggaa

SEQ ID NO: 85523 - DNA, 21 bp, Homo sapiens
cattaatattgcttgagctgg

SEQ ID NO: 85524 - DNA, 17 bp, Homo sapiens
acaaaacccatatcgta

SEQ ID NO: 85525 - DNA, 18 bp, Homo sapiens
ttgtgctcactgtacttg

SEQ ID NO: 85526 - DNA, 19 bp, Homo sapiens
tctcagttcagaggcaacg

SEQ ID NO: 85527 - DNA, 19 bp, Homo sapiens
tgttcctcaaagttttcct

SEQ ID NO: 85528 - DNA, 21 bp, Homo sapiens
agataagccagttgataatgc

SEQ ID NO: 85529 - DNA, 24 bp, Homo sapiens
caaatgacttgatgggaaaaagtg

SEQ ID NO: 85530 - DNA, 19 bp, Homo sapiens
agtctaatatcaagcctgt

SEQ ID NO: 85531 - DNA, 18 bp, Homo sapiens
tgagtccagtttcgttgc

SEQ ID NO: 85532 - DNA, 19 bp, Homo sapiens
caaagtccaaaagtcactt

SEQ ID NO: 85533 - DNA, 23 bp, Homo sapiens
cctcctttgatactacatttggc

SEQ ID NO: 85534 - DNA, 18 bp, Homo sapiens
ggaaatgcagaagaggaa

SEQ ID NO: 85535 - DNA, 23 bp, Homo sapiens
gcctgcagtgatattaactgtct

SEQ ID NO: 85536 - DNA, 21 bp, Homo sapiens
atttgcagaatacattcaagg

SEQ ID NO: 85537 - DNA, 21 bp, Homo sapiens
cttccttttgttcacattcaa

SEQ ID NO: 85538 - DNA, 17 bp, Homo sapiens
acatgaagttaaccaca

SEQ ID NO: 85539 - DNA, 20 bp, Homo sapiens
gtgggcagagaatgttgcac

SEQ ID NO: 85540 - DNA, 18 bp, Homo sapiens
tcatggttgttccaaaga

SEQ ID NO: 85541 - DNA, 23 bp, Homo sapiens
aatgactggcgctttgaaacctt

SEQ ID NO: 85542 - DNA, 21 bp, Homo sapiens
aggcaaaaacagaaccaaata

SEQ ID NO: 85543 - DNA, 20 bp, Homo sapiens
atttctatgcttgtttcccg

SEQ ID NO: 85544 - DNA, 18 bp, Homo sapiens
gattatggcactcaggaa

SEQ ID NO: 85545 - DNA, 22 bp, Homo sapiens
tctgtgtcatttctattatctt

SEQ ID NO: 85546 - DNA, 17 bp, Homo sapiens
agggttttgcaaactga

SEQ ID NO: 85547 - DNA, 21 bp, Homo sapiens
caaatgctgcacactgactca

SEQ ID NO: 85548 - DNA, 19 bp, Homo sapiens
agaaacagttaaagtgtct

SEQ ID NO: 85549 - DNA, 21 bp, Homo sapiens
ccagtaacgagatactttcct

SEQ ID NO: 85550 - DNA, 19 bp, Homo sapiens
ccagtgaacttaaagaatt

SEQ ID NO: 85551 - DNA, 22 bp, Homo sapiens
gctactctctacagatctttca

SEQ ID NO: 85552 - DNA, 16 bp, Homo sapiens
ttcccagagctgaagt

SEQ ID NO: 85553 - DNA, 18 bp, Homo sapiens
tggggtcttcagcattat

SEQ ID NO: 85554 - DNA, 17 bp, Homo sapiens
tgcaactggagccaaga

SEQ ID NO: 85555 - DNA, 20 bp, Homo sapiens
tcttggaaggctaggattga

SEQ ID NO: 85556 - DNA, 17 bp, Homo sapiens
ccaaatgccagtcaggc

SEQ ID NO: 85557 - DNA, 17 bp, Homo sapiens
accaggtgcatttgtta

SEQ ID NO: 85558 - DNA, 18 bp, Homo sapiens
ttgtactgaattgcaaat

SEQ ID NO: 85559 - DNA, 16 bp, Homo sapiens
tttggcttgttactct

SEQ ID NO: 85560 - DNA, 18 bp, Homo sapiens
cttctaccaggcatattc

SEQ ID NO: 85561 - DNA, 19 bp, Homo sapiens
gttgtaggtttctgctgtg

SEQ ID NO: 85562 - DNA, 23 bp, Homo sapiens
actcgaattaaatatccacaatt

SEQ ID NO: 85563 - DNA, 19 bp, Homo sapiens
gctagaacaactatcaatt

SEQ ID NO: 85564 - DNA, 21 bp, Homo sapiens
cgaaaaagaatctgctttcaa

SEQ ID NO: 85565 - DNA, 18 bp, Homo sapiens
actagttcaagcgcatga

SEQ ID NO: 85566 - DNA, 23 bp, Homo sapiens
tcatgagaataaaacaaaaggtg

SEQ ID NO: 85567 - DNA, 17 bp, Homo sapiens
tgcttttgaattgtgga

SEQ ID NO: 85568 - DNA, 18 bp, Homo sapiens
actaaccaaacggagcag

SEQ ID NO: 85569 - DNA, 17 bp, Homo sapiens
taggttcagctttcgtt

SEQ ID NO: 85570 - DNA, 23 bp, Homo sapiens
ggattttatcaagaaagcagatt

SEQ ID NO: 85571 - DNA, 22 bp, Homo sapiens
ttaggatttttctcattctgaa

SEQ ID NO: 85572 - DNA, 16 bp, Homo sapiens
gcgtcccctcacaaat

SEQ ID NO: 85573 - DNA, 19 bp, Homo sapiens
attcatcacttgaccattc

SEQ ID NO: 85574 - DNA, 19 bp, Homo sapiens
gccatgtaactgaaaatct

SEQ ID NO: 85575 - DNA, 23 bp, Homo sapiens
aggagtcttttgaactgccaaat

SEQ ID NO: 85576 - DNA, 22 bp, Homo sapiens
gagagtaatattgaagacaaaa

SEQ ID NO: 85577 - DNA, 19 bp, Homo sapiens
ggtctccttttacgcttta

SEQ ID NO: 85578 - DNA, 19 bp, Homo sapiens
gatcctcatgaggctttaa

SEQ ID NO: 85579 - DNA, 22 bp, Homo sapiens
caaatgctcctataattagatt

SEQ ID NO: 85580 - DNA, 21 bp, Homo sapiens
cgttctaaatgaggtagatga

SEQ ID NO: 85581 - DNA, 21 bp, Homo sapiens
ccttcttccgataggttttcc

SEQ ID NO: 85582 - DNA, 17 bp, Homo sapiens
tgactcacatgatgggg

SEQ ID NO: 85583 - DNA, 19 bp, Homo sapiens
tgaactctttcacttttac

SEQ ID NO: 85584 - DNA, 21 bp, Homo sapiens
ctaaatagcagcattcagaaa

SEQ ID NO: 85585 - DNA, 22 bp, Homo sapiens
ctctgaagaaccagaatattca

SEQ ID NO: 85586 - DNA, 17 bp, Homo sapiens
gaaactgccatgctcag

SEQ ID NO: 85587 - DNA, 21 bp, Homo sapiens
ctttggcatttgattcagact

SEQ ID NO: 85588 - DNA, 19 bp, Homo sapiens
ccagcacagaaaaaaaggt

SEQ ID NO: 85589 - DNA, 19 bp, Homo sapiens
ctggaaaaccactcattaa

SEQ ID NO: 85590 - DNA, 19 bp, Homo sapiens
agccaacataacagatggg

SEQ ID NO: 85591 - DNA, 22 bp, Homo sapiens
tcagtatctctaggattctctg

SEQ ID NO: 85592 - DNA, 23 bp, Homo sapiens
tcactaaagacagaatgaatgta

SEQ ID NO: 85593 - DNA, 18 bp, Homo sapiens
acaggggatcagcattca

SEQ ID NO: 85594 - DNA, 17 bp, Homo sapiens
aaatactcatgccagct

SEQ ID NO: 85595 - DNA, 19 bp, Homo sapiens
atgtttccttacttccagc

SEQ ID NO: 85596 - DNA, 19 bp, Homo sapiens
aggcatccagaaaagtatc

SEQ ID NO: 85597 - DNA, 20 bp, Homo sapiens
gcttttattacagaattcag

SEQ ID NO: 85598 - DNA, 18 bp, Homo sapiens
ctgaacatcatcaaccca

SEQ ID NO: 85599 - DNA, 20 bp, Homo sapiens
gctgttctcatgctgtaatg

SEQ ID NO: 85600 - DNA, 22 bp, Homo sapiens
gagtaccttgttatttttgtat

SEQ ID NO: 85601 - DNA, 18 bp, Homo sapiens
tgaaacagaactaccctg

SEQ ID NO: 85602 - DNA, 19 bp, Homo sapiens
atttccacctccaaggtgt

SEQ ID NO: 85603 - DNA, 19 bp, Homo sapiens
caaatcattattactgggt

SEQ ID NO: 85604 - DNA, 19 bp, Homo sapiens
agctacatcttcagtatac

SEQ ID NO: 85605 - DNA, 16 bp, Homo sapiens
tcacaagcagctgaaa

SEQ ID NO: 85606 - DNA, 16 bp, Homo sapiens
aaagggtaatggcaaa

SEQ ID NO: 85607 - DNA, 20 bp, Homo sapiens
accacgacatttgacagaga

SEQ ID NO: 85608 - DNA, 21 bp, Homo sapiens
gagatcaagaattgttacaaa

SEQ ID NO: 85609 - DNA, 19 bp, Homo sapiens
aggtcccaaatggtcttca

SEQ ID NO: 85610 - DNA, 20 bp, Homo sapiens
tgcatacatgtaactagtgt

SEQ ID NO: 85611 - DNA, 18 bp, Homo sapiens
agtgcctgttaagttggc

SEQ ID NO: 85612 - DNA, 19 bp, Homo sapiens
ggtcagctttctgtaatcg

SEQ ID NO: 85613 - DNA, 22 bp, Homo sapiens
tttcatccctggttccttgagg

SEQ ID NO: 85614 - DNA, 23 bp, Homo sapiens
ccatttcatttcaactagaagtt

SEQ ID NO: 85615 - DNA, 18 bp, Homo sapiens
ggtgagtcaaagagaacc

SEQ ID NO: 85616 - DNA, 18 bp, Homo sapiens
atcccaagtcgtgtgttt

SEQ ID NO: 85617 - DNA, 22 bp, Homo sapiens
ggggggaaattttttaggatct

SEQ ID NO: 85618 - DNA, 26 bp, Homo sapiens
ataaaagttaaaatatttttaaaaag

SEQ ID NO: 85619 - DNA, 22 bp, Homo sapiens
ttttcaacaagtacattttttt

SEQ ID NO: 85620 - DNA, 16 bp, Homo sapiens
ccagcttcatagacaa

SEQ ID NO: 85621 - DNA, 16 bp, Homo sapiens
ttgtacctgccacagt

SEQ ID NO: 85622 - DNA, 18 bp, Homo sapiens
cggtatcttcagaagaat

SEQ ID NO: 85623 - DNA, 21 bp, Homo sapiens
aagattcttcaaggtgggaac

SEQ ID NO: 85624 - DNA, 20 bp, Homo sapiens
agcagcggatacaacctcaa

SEQ ID NO: 85625 - DNA, 20 bp, Homo sapiens
aaaattcacttcccaaagct

SEQ ID NO: 85626 - DNA, 16 bp, Homo sapiens
gtctcagtgtccaact

SEQ ID NO: 85627 - DNA, 17 bp, Homo sapiens
agataaggaatccagca

SEQ ID NO: 85628 - DNA, 21 bp, Homo sapiens
aggaggaaaagcacagaactg

SEQ ID NO: 85629 - DNA, 21 bp, Homo sapiens
acccaattcaatgtagacaga

SEQ ID NO: 85630 - DNA, 17 bp, Homo sapiens
ctgactgatgatggtca

SEQ ID NO: 85631 - DNA, 22 bp, Homo sapiens
ttctcacagttccaaggttaga

SEQ ID NO: 85632 - DNA, 16 bp, Homo sapiens
agccccagacatttta

SEQ ID NO: 85633 - DNA, 18 bp, Homo sapiens
tacaaaaattagcctggc

SEQ ID NO: 85634 - DNA, 19 bp, Homo sapiens
aaaagacttctacagagtg

SEQ ID NO: 85635 - DNA, 21 bp, Homo sapiens
ggggctaaggcaggaggactg

SEQ ID NO: 85636 - DNA, 20 bp, Homo sapiens
tcctgaacatctaaaagatg

SEQ ID NO: 85637 - DNA, 25 bp, Homo sapiens
aaaagaaaaaaaaaagaaaagaaga

SEQ ID NO: 85638 - DNA, 22 bp, Homo sapiens
taatgttttcccttgtatttta

SEQ ID NO: 85639 - DNA, 18 bp, Homo sapiens
aggaaggattttcgggtt

SEQ ID NO: 85640 - DNA, 19 bp, Homo sapiens
gtttctcttggtttctttg

SEQ ID NO: 85641 - DNA, 21 bp, Homo sapiens
tggatgatagaaacttcatct

SEQ ID NO: 85642 - DNA, 23 bp, Homo sapiens
ttttaaaaaaaatcacaggtaac

SEQ ID NO: 85643 - DNA, 16 bp, Homo sapiens
agctgtttgcatctgt

SEQ ID NO: 85644 - DNA, 20 bp, Homo sapiens
gataaaataaggtgtgagac

SEQ ID NO: 85645 - DNA, 16 bp, Homo sapiens
ttgtgcttttcagctt

SEQ ID NO: 85646 - DNA, 19 bp, Homo sapiens
acagaactaaaattaacct

SEQ ID NO: 85647 - DNA, 16 bp, Homo sapiens
caggagcctacaagaa

SEQ ID NO: 85648 - DNA, 23 bp, Homo sapiens
ttgtgcaaacttcctgagttttc

SEQ ID NO: 85649 - DNA, 24 bp, Homo sapiens
ttattttagtgtccttaaaaggtt

SEQ ID NO: 85650 - DNA, 16 bp, Homo sapiens
aacctgtgtcaagctg

SEQ ID NO: 85651 - DNA, 23 bp, Homo sapiens
attgattatagaggttttctact

SEQ ID NO: 85652 - DNA, 20 bp, Homo sapiens
gttgactaaatctcgtactt

SEQ ID NO: 85653 - DNA, 17 bp, Homo sapiens
cccataaaactttcagg

SEQ ID NO: 85654 - DNA, 16 bp, Homo sapiens
gggccttcacagtgtc

SEQ ID NO: 85655 - DNA, 22 bp, Homo sapiens
tcttttataaatttttctgatg

SEQ ID NO: 85656 - DNA, 22 bp, Homo sapiens
aattgttctttctttctttata

SEQ ID NO: 85657 - DNA, 17 bp, Homo sapiens
tactgtggttgcttcca

SEQ ID NO: 85658 - DNA, 23 bp, Homo sapiens
tgagattatcttttcatggctat

SEQ ID NO: 85659 - DNA, 18 bp, Homo sapiens
tcttacataaaggacact

SEQ ID NO: 85660 - DNA, 21 bp, Homo sapiens
aaactattgcttgtaattcac

SEQ ID NO: 85661 - DNA, 26 bp, Homo sapiens
cagcatgcaaaatctataaattataa

SEQ ID NO: 85662 - DNA, 18 bp, Homo sapiens
tgcaagtaagtttgaatg

SEQ ID NO: 85663 - DNA, 19 bp, Homo sapiens
actctctgagaaagaatga

SEQ ID NO: 85664 - DNA, 17 bp, Homo sapiens
cctgctagtctggagtt

SEQ ID NO: 85665 - DNA, 21 bp, Homo sapiens
aagtaaagcttctataaagtt

SEQ ID NO: 85666 - DNA, 25 bp, Homo sapiens
ttcactaagaatagctttattttta

SEQ ID NO: 85667 - DNA, 18 bp, Homo sapiens
aatggagccacataacac

SEQ ID NO: 85668 - DNA, 16 bp, Homo sapiens
cgaacttgaggcctta

SEQ ID NO: 85669 - DNA, 22 bp, Homo sapiens
gtggagacaggttccttgatca

SEQ ID NO: 85670 - DNA, 22 bp, Homo sapiens
ggatggagaacaaggaatcatt

SEQ ID NO: 85671 - DNA, 19 bp, Homo sapiens
tgtcattaatgctatgcag

SEQ ID NO: 85672 - DNA, 22 bp, Homo sapiens
acaatagcctaatcttactaga

SEQ ID NO: 85673 - DNA, 20 bp, Homo sapiens
agttcattggaacagaaaga

SEQ ID NO: 85674 - DNA, 23 bp, Homo sapiens
catttgcataggagataatcata

SEQ ID NO: 85675 - DNA, 23 bp, Homo sapiens
gaagttgtcattttataaacctt

SEQ ID NO: 85676 - DNA, 19 bp, Homo sapiens
cagatgggacactctaaga

SEQ ID NO: 85677 - DNA, 19 bp, Homo sapiens
attctaaaaccttccaaat

SEQ ID NO: 85678 - DNA, 20 bp, Homo sapiens
acgcgaagagcagataaatc

SEQ ID NO: 85679 - DNA, 19 bp, Homo sapiens
tcctgaggaacagtccagc

SEQ ID NO: 85680 - DNA, 23 bp, Homo sapiens
ggtttcagaaccgccgggtcaaa

SEQ ID NO: 85681 - DNA, 22 bp, Homo sapiens
ctcagcagagtccttggcccca

SEQ ID NO: 85682 - DNA, 19 bp, Homo sapiens
aaggacaagaggcgcaaga

SEQ ID NO: 85683 - DNA, 20 bp, Homo sapiens
actttcgctcctcccaccca

SEQ ID NO: 85684 - DNA, 16 bp, Homo sapiens
cagcaaggggcagttg

SEQ ID NO: 85685 - DNA, 17 bp, Homo sapiens
ggcgagaaccttcttct

SEQ ID NO: 85686 - DNA, 16 bp, Homo sapiens
ggcagcaccctcctga

SEQ ID NO: 85687 - DNA, 16 bp, Homo sapiens
ctggtggctgccgaga

SEQ ID NO: 85688 - DNA, 19 bp, Homo sapiens
ctgcatgggtgggtatctg

SEQ ID NO: 85689 - DNA, 17 bp, Homo sapiens
catactcccgctccagc

SEQ ID NO: 85690 - DNA, 20 bp, Homo sapiens
ctgtagggtgacctgtgtgc

SEQ ID NO: 85691 - DNA, 21 bp, Homo sapiens
ccgcgacgaaaggcgcaggcg

SEQ ID NO: 85692 - DNA, 24 bp, Homo sapiens
acaagccggaagccagggtgctgt

SEQ ID NO: 85693 - DNA, 22 bp, Homo sapiens
ccagctactcagacctccttca

SEQ ID NO: 85694 - DNA, 18 bp, Homo sapiens
tgtgttgccagggagaac

SEQ ID NO: 85695 - DNA, 24 bp, Homo sapiens
catcctcaccagctccaagtctcc

SEQ ID NO: 85696 - DNA, 24 bp, Homo sapiens
acatgactccctgttgcctgtgga

SEQ ID NO: 85697 - DNA, 18 bp, Homo sapiens
caggctcagagacaaggg

SEQ ID NO: 85698 - DNA, 16 bp, Homo sapiens
cagttacctggacgtg

SEQ ID NO: 85699 - DNA, 23 bp, Homo sapiens
agggacctggtgggttctgttct

SEQ ID NO: 85700 - DNA, 16 bp, Homo sapiens
cgccccactgagtttg

SEQ ID NO: 85701 - DNA, 16 bp, Homo sapiens
gactggtaactgtcca

SEQ ID NO: 85702 - DNA, 21 bp, Homo sapiens
ctgtgcccaggcagccaccct

SEQ ID NO: 85703 - DNA, 24 bp, Homo sapiens
cacccagagtctgcaccacagaca

SEQ ID NO: 85704 - DNA, 19 bp, Homo sapiens
tactttggaggcgggtact

SEQ ID NO: 85705 - DNA, 23 bp, Homo sapiens
ccggatatcccggatagaaggca

SEQ ID NO: 85706 - DNA, 21 bp, Homo sapiens
cgccaaagcaatgccacccat

SEQ ID NO: 85707 - DNA, 24 bp, Homo sapiens
gagtctccgcggggtacgcggcca

SEQ ID NO: 85708 - DNA, 22 bp, Homo sapiens
cgcctacgctgatgcctgctgt

SEQ ID NO: 85709 - DNA, 19 bp, Homo sapiens
gacactcggcaggagtagt

SEQ ID NO: 85710 - DNA, 18 bp, Homo sapiens
gaggggggcggaatctgg

SEQ ID NO: 85711 - DNA, 20 bp, Homo sapiens
gacgtcccctggggcacccc

SEQ ID NO: 85712 - DNA, 19 bp, Homo sapiens
ggagcccggcaattatgcc

SEQ ID NO: 85713 - DNA, 24 bp, Homo sapiens
gcctggcagatccaagggggcata

SEQ ID NO: 85714 - DNA, 24 bp, Homo sapiens
tggggagagcgagctgggtgcccc

SEQ ID NO: 85715 - DNA, 23 bp, Homo sapiens
gtcagaggggagtgggcgaccag

SEQ ID NO: 85716 - DNA, 24 bp, Homo sapiens
aatgcaggcgacttgcgagctggg

SEQ ID NO: 85717 - DNA, 23 bp, Homo sapiens
tatccttggctccatccaaggtg

SEQ ID NO: 85718 - DNA, 24 bp, Homo sapiens
aatggtgcataagtgtgaaaattt

SEQ ID NO: 85719 - DNA, 22 bp, Homo sapiens
gaaactcaccaaatcccgctgc

SEQ ID NO: 85720 - DNA, 19 bp, Homo sapiens
caggccgcagagccggccc

SEQ ID NO: 85721 - DNA, 18 bp, Homo sapiens
ctcagcagtctggaaccc

SEQ ID NO: 85722 - DNA, 23 bp, Homo sapiens
ccagcgagggcgtgcggagtttg

SEQ ID NO: 85723 - DNA, 22 bp, Homo sapiens
ctcagcttgccatcaggagtcg

SEQ ID NO: 85724 - DNA, 24 bp, Homo sapiens
aagacgttccgctttgaaatgcag

SEQ ID NO: 85725 - DNA, 16 bp, Homo sapiens
aaggccgaggcgagag

SEQ ID NO: 85726 - DNA, 16 bp, Homo sapiens
tgaagctggtgtctgc

SEQ ID NO: 85727 - DNA, 16 bp, Homo sapiens
gagctctttcacgctg

SEQ ID NO: 85728 - DNA, 16 bp, Homo sapiens
ttctaaggcttctgct

SEQ ID NO: 85729 - DNA, 18 bp, Homo sapiens
atgtttctccactcctag

SEQ ID NO: 85730 - DNA, 16 bp, Homo sapiens
actcagatgtaccagc

SEQ ID NO: 85731 - DNA, 22 bp, Homo sapiens
tcgattatcatgttacactttt

SEQ ID NO: 85732 - DNA, 16 bp, Homo sapiens
gaagccctgggtatgc

SEQ ID NO: 85733 - DNA, 18 bp, Homo sapiens
tgggatatctaaagcaga

SEQ ID NO: 85734 - DNA, 17 bp, Homo sapiens
gttttcattaagggcac

SEQ ID NO: 85735 - DNA, 23 bp, Homo sapiens
gaatgtctcacaaataaaccaag

SEQ ID NO: 85736 - DNA, 19 bp, Homo sapiens
aaaggagaacactttattt

SEQ ID NO: 85737 - DNA, 16 bp, Homo sapiens
cttcttgagcaggagc

SEQ ID NO: 85738 - DNA, 19 bp, Homo sapiens
tggtttcctgacgatagta

SEQ ID NO: 85739 - DNA, 16 bp, Homo sapiens
cttgggggtggagtgc

SEQ ID NO: 85740 - DNA, 21 bp, Homo sapiens
aagctaatttttgtttaatgc

SEQ ID NO: 85741 - DNA, 19 bp, Homo sapiens
gtgttggaaaaacacaatt

SEQ ID NO: 85742 - DNA, 18 bp, Homo sapiens
ttctggtatctgcacatc

SEQ ID NO: 85743 - DNA, 24 bp, Homo sapiens
gttgccttggggagtatatttaca

SEQ ID NO: 85744 - DNA, 18 bp, Homo sapiens
tcaaccataaaacttccc

SEQ ID NO: 85745 - DNA, 24 bp, Homo sapiens
ctggagttcaaaaacactacctta

SEQ ID NO: 85746 - DNA, 18 bp, Homo sapiens
tttttctgctataagctg

SEQ ID NO: 85747 - DNA, 17 bp, Homo sapiens
gtatgcagttggcagta

SEQ ID NO: 85748 - DNA, 21 bp, Homo sapiens
caaatgcaaattacttttatt

SEQ ID NO: 85749 - DNA, 22 bp, Homo sapiens
agtttttattgatacagaggga

SEQ ID NO: 85750 - DNA, 20 bp, Homo sapiens
tccagtaattaggcttcaca

SEQ ID NO: 85751 - DNA, 17 bp, Homo sapiens
gcattcagcaccttcag

SEQ ID NO: 85752 - DNA, 21 bp, Homo sapiens
caggctgtggcatttctcatt

SEQ ID NO: 85753 - DNA, 24 bp, Homo sapiens
tatgaactgtttatagtaattttg

SEQ ID NO: 85754 - DNA, 25 bp, Homo sapiens
acagcgaaaataataaatatgagaa

SEQ ID NO: 85755 - DNA, 19 bp, Homo sapiens
caaaggagaacattttgtt

SEQ ID NO: 85756 - DNA, 17 bp, Homo sapiens
aaggaaatctggaagaa

SEQ ID NO: 85757 - DNA, 20 bp, Homo sapiens
acaggtaaaactaattaaga

SEQ ID NO: 85758 - DNA, 20 bp, Homo sapiens
cacctcaaaaaatacttggt

SEQ ID NO: 85759 - DNA, 24 bp, Homo sapiens
gatttcactcttgataatattctt

SEQ ID NO: 85760 - DNA, 21 bp, Homo sapiens
ctcaattggctttgactttga

SEQ ID NO: 85761 - DNA, 21 bp, Homo sapiens
agttactggcacaagtttatc

SEQ ID NO: 85762 - DNA, 24 bp, Homo sapiens
tatacatacacaaaacaaatataa

SEQ ID NO: 85763 - DNA, 22 bp, Homo sapiens
cctatatgctatttactgttcc

SEQ ID NO: 85764 - DNA, 16 bp, Homo sapiens
ctaggtcatgacgaaa

SEQ ID NO: 85765 - DNA, 21 bp, Homo sapiens
aataagagagaaggtccctgc

SEQ ID NO: 85766 - DNA, 18 bp, Homo sapiens
gcaaggctgatcatttgc

SEQ ID NO: 85767 - DNA, 25 bp, Homo sapiens
ttatttttcgtaacaaatctaatat

SEQ ID NO: 85768 - DNA, 18 bp, Homo sapiens
acagtcttgactttgtta

SEQ ID NO: 85769 - DNA, 16 bp, Homo sapiens
ttgcttttccatttcg

SEQ ID NO: 85770 - DNA, 22 bp, Homo sapiens
ctgcatgtctatattatttgtc

SEQ ID NO: 85771 - DNA, 18 bp, Homo sapiens
attaaatggcctagccca

SEQ ID NO: 85772 - DNA, 19 bp, Homo sapiens
gacacttatgaccagaatt

SEQ ID NO: 85773 - DNA, 20 bp, Homo sapiens
cctcagcctccggagtagct

SEQ ID NO: 85774 - DNA, 22 bp, Homo sapiens
tgcaggaacaagcaaggcctga

SEQ ID NO: 85775 - DNA, 21 bp, Homo sapiens
aaagagataagaaaaactgtg

SEQ ID NO: 85776 - DNA, 22 bp, Homo sapiens
tcaaagagactcacctaatttt

SEQ ID NO: 85777 - DNA, 21 bp, Homo sapiens
tgaacaagacaaatacagtct

SEQ ID NO: 85778 - DNA, 21 bp, Homo sapiens
aacaaagattgatagaaatca

SEQ ID NO: 85779 - DNA, 20 bp, Homo sapiens
aactaaaaggaacaatcagt

SEQ ID NO: 85780 - DNA, 22 bp, Homo sapiens
ctcaggatattactcattttcc

SEQ ID NO: 85781 - DNA, 16 bp, Homo sapiens
tttgctttcggtccca

SEQ ID NO: 85782 - DNA, 24 bp, Homo sapiens
aataaagtaagattatatttgatc

SEQ ID NO: 85783 - DNA, 22 bp, Homo sapiens
tgtaagtgttcattcagtataa

SEQ ID NO: 85784 - DNA, 21 bp, Homo sapiens
cagtaaggccatatacagtta

SEQ ID NO: 85785 - DNA, 16 bp, Homo sapiens
tcacttcatgggtcac

SEQ ID NO: 85786 - DNA, 19 bp, Homo sapiens
acaatacggctaatctttc

SEQ ID NO: 85787 - DNA, 24 bp, Homo sapiens
ggtgtatttttaatatttctctcc

SEQ ID NO: 85788 - DNA, 17 bp, Homo sapiens
tttgaaacagtactgtg

SEQ ID NO: 85789 - DNA, 26 bp, Homo sapiens
tataataaacctatacatttaaataa

SEQ ID NO: 85790 - DNA, 17 bp, Homo sapiens
tagataattaccgccca

SEQ ID NO: 85791 - DNA, 21 bp, Homo sapiens
agttcatgtgtttgtatgtat

SEQ ID NO: 85792 - DNA, 19 bp, Homo sapiens
ctgtcctcaaatatgcttg

SEQ ID NO: 85793 - DNA, 22 bp, Homo sapiens
gtcacccagccagaaggaatgc

SEQ ID NO: 85794 - DNA, 23 bp, Homo sapiens
ttgtgactacaatattctgtata

SEQ ID NO: 85795 - DNA, 19 bp, Homo sapiens
gatctgcccacctcagcct

SEQ ID NO: 85796 - DNA, 24 bp, Homo sapiens
cctggccctagaataaagtagctt

SEQ ID NO: 85797 - DNA, 22 bp, Homo sapiens
agatttgtttctgggttataat

SEQ ID NO: 85798 - DNA, 24 bp, Homo sapiens
ttcttaaagcatatttgtatatat

SEQ ID NO: 85799 - DNA, 19 bp, Homo sapiens
gtaacaagtccacttgtac

SEQ ID NO: 85800 - DNA, 17 bp, Homo sapiens
tgttacttctgcatgtt

SEQ ID NO: 85801 - DNA, 20 bp, Homo sapiens
ttcccattcacttcatatga

SEQ ID NO: 85802 - DNA, 17 bp, Homo sapiens
tcacgagacccagagga

SEQ ID NO: 85803 - DNA, 17 bp, Homo sapiens
acccaaaaactcaagaa

SEQ ID NO: 85804 - DNA, 19 bp, Homo sapiens
agaactttaaaccatctcc

SEQ ID NO: 85805 - DNA, 20 bp, Homo sapiens
aaaagtatgccacttattca

SEQ ID NO: 85806 - DNA, 17 bp, Homo sapiens
tgtaaaaacaacttgga

SEQ ID NO: 85807 - DNA, 19 bp, Homo sapiens
agcatgatgacatattttt

SEQ ID NO: 85808 - DNA, 22 bp, Homo sapiens
gatacaaagttgaatggaattc

SEQ ID NO: 85809 - DNA, 20 bp, Homo sapiens
aacatgcctttatttttgga

SEQ ID NO: 85810 - DNA, 23 bp, Homo sapiens
aaattagaactataaaagaagta

SEQ ID NO: 85811 - DNA, 19 bp, Homo sapiens
cagttccagttcatttatc

SEQ ID NO: 85812 - DNA, 20 bp, Homo sapiens
ctgaaactgatagaggaaat

SEQ ID NO: 85813 - DNA, 19 bp, Homo sapiens
tactttcttcaatatgcag

SEQ ID NO: 85814 - DNA, 19 bp, Homo sapiens
ctattttacacctgaactt

SEQ ID NO: 85815 - DNA, 18 bp, Homo sapiens
tctctggctgaatctact

SEQ ID NO: 85816 - DNA, 21 bp, Homo sapiens
gaagaagataaacagtccact

SEQ ID NO: 85817 - DNA, 18 bp, Homo sapiens
tgaattgttagccaatct

SEQ ID NO: 85818 - DNA, 18 bp, Homo sapiens
ctctgttctgaagaagcc

SEQ ID NO: 85819 - DNA, 19 bp, Homo sapiens
catctgtatcttcaggatc

SEQ ID NO: 85820 - DNA, 25 bp, Homo sapiens
aaaccattatttcatcattaaagat

SEQ ID NO: 85821 - DNA, 23 bp, Homo sapiens
tctgcttctgtttcaaaatctct

SEQ ID NO: 85822 - DNA, 18 bp, Homo sapiens
tgtgaatcctcaaatctg

SEQ ID NO: 85823 - DNA, 18 bp, Homo sapiens
ttcaatgtctggatccag

SEQ ID NO: 85824 - DNA, 17 bp, Homo sapiens
gtcctccccgtttcaaa

SEQ ID NO: 85825 - DNA, 22 bp, Homo sapiens
ttctagtaagggtggcatcaat

SEQ ID NO: 85826 - DNA, 22 bp, Homo sapiens
cagtattttactggtaaaatac

SEQ ID NO: 85827 - DNA, 18 bp, Homo sapiens
acgatgtgtttactgtca

SEQ ID NO: 85828 - DNA, 19 bp, Homo sapiens
cccaactttcaacaaacaa

SEQ ID NO: 85829 - DNA, 21 bp, Homo sapiens
actttccatcttctctgtttt

SEQ ID NO: 85830 - DNA, 16 bp, Homo sapiens
attcctggaagaagca

SEQ ID NO: 85831 - DNA, 16 bp, Homo sapiens
gagctcaggtgttgcc

SEQ ID NO: 85832 - DNA, 17 bp, Homo sapiens
tgttagctaggagcaga

SEQ ID NO: 85833 - DNA, 19 bp, Homo sapiens
gaccagctaactctctttg

SEQ ID NO: 85834 - DNA, 23 bp, Homo sapiens
gctctaagttatgtatcctatac

SEQ ID NO: 85835 - DNA, 16 bp, Homo sapiens
tttctgctttccctgc

SEQ ID NO: 85836 - DNA, 24 bp, Homo sapiens
ctttcagagttaatattctgttcc

SEQ ID NO: 85837 - DNA, 19 bp, Homo sapiens
tgacaaaagtttgttccca

SEQ ID NO: 85838 - DNA, 16 bp, Homo sapiens
ttcacctctaccaagt

SEQ ID NO: 85839 - DNA, 19 bp, Homo sapiens
attacaaaccaccatattt

SEQ ID NO: 85840 - DNA, 19 bp, Homo sapiens
aattttgtggaagatgaag

SEQ ID NO: 85841 - DNA, 21 bp, Homo sapiens
aatataatgaaagacttctct

SEQ ID NO: 85842 - DNA, 20 bp, Homo sapiens
cctctttaaagtacagtacc

SEQ ID NO: 85843 - DNA, 21 bp, Homo sapiens
tctggagataatgctacttgg

SEQ ID NO: 85844 - DNA, 18 bp, Homo sapiens
tccataaaggacagaacc

SEQ ID NO: 85845 - DNA, 19 bp, Homo sapiens
cctggacacatatctttgc

SEQ ID NO: 85846 - DNA, 19 bp, Homo sapiens
cctttgaaagtgcactgga

SEQ ID NO: 85847 - DNA, 24 bp, Homo sapiens
atgacttgctgcttccagtaaata

SEQ ID NO: 85848 - DNA, 19 bp, Homo sapiens
acctttttctttaggactt

SEQ ID NO: 85849 - DNA, 21 bp, Homo sapiens
ctcattgtcctgtatattggt

SEQ ID NO: 85850 - DNA, 17 bp, Homo sapiens
agcaagtgtattacctt

SEQ ID NO: 85851 - DNA, 16 bp, Homo sapiens
gaaaattcagccaagg

SEQ ID NO: 85852 - DNA, 20 bp, Homo sapiens
aaaaaacatatggagaacca

SEQ ID NO: 85853 - DNA, 19 bp, Homo sapiens
gctgccgtacccatttaga

SEQ ID NO: 85854 - DNA, 24 bp, Homo sapiens
gttatgtaagatttaaaagttcta

SEQ ID NO: 85855 - DNA, 18 bp, Homo sapiens
agtggatgatcgctttag

SEQ ID NO: 85856 - DNA, 21 bp, Homo sapiens
caatattgtactgtgcactta

SEQ ID NO: 85857 - DNA, 23 bp, Homo sapiens
ttatttgactttttccctatttt

SEQ ID NO: 85858 - DNA, 24 bp, Homo sapiens
atatgaagattgttactagttttt

SEQ ID NO: 85859 - DNA, 18 bp, Homo sapiens
ccaattttctgtctgtcc

SEQ ID NO: 85860 - DNA, 18 bp, Homo sapiens
cgacttgggttattccta

SEQ ID NO: 85861 - DNA, 20 bp, Homo sapiens
tggatagcttctgtaacttt

SEQ ID NO: 85862 - DNA, 21 bp, Homo sapiens
tttctgtgtctaatacatcta

SEQ ID NO: 85863 - DNA, 23 bp, Homo sapiens
cttttcaaattctacttgtgaca

SEQ ID NO: 85864 - DNA, 18 bp, Homo sapiens
gccgtcagtggtatgaaa

SEQ ID NO: 85865 - DNA, 25 bp, Homo sapiens
taaataaaattttaccaagtttatt

SEQ ID NO: 85866 - DNA, 19 bp, Homo sapiens
aggttgaactaaaacgaca

SEQ ID NO: 85867 - DNA, 22 bp, Homo sapiens
ctgtcacagataatattatatt

SEQ ID NO: 85868 - DNA, 23 bp, Homo sapiens
agaagttaatatgatgtttaaaa

SEQ ID NO: 85869 - DNA, 17 bp, Homo sapiens
aggccctgtatgcttga

SEQ ID NO: 85870 - DNA, 22 bp, Homo sapiens
agtactgaaaaacaaaataaaa

SEQ ID NO: 85871 - DNA, 17 bp, Homo sapiens
tggtggtcattgtattg

SEQ ID NO: 85872 - DNA, 19 bp, Homo sapiens
atggtgctgaaagacttgc

SEQ ID NO: 85873 - DNA, 16 bp, Homo sapiens
cgtgctgtcataacaa

SEQ ID NO: 85874 - DNA, 22 bp, Homo sapiens
aaagcactataaaagcaaagcg

SEQ ID NO: 85875 - DNA, 17 bp, Homo sapiens
cctggtagcagtttgtc

SEQ ID NO: 85876 - DNA, 22 bp, Homo sapiens
accaatgactcctgtaataata

SEQ ID NO: 85877 - DNA, 19 bp, Homo sapiens
tgacaagaataagcaattt

SEQ ID NO: 85878 - DNA, 22 bp, Homo sapiens
ggaaaaggaattcctattgtta

SEQ ID NO: 85879 - DNA, 27 bp, Homo sapiens
tattttgattattttaaatttgctact

SEQ ID NO: 85880 - DNA, 16 bp, Homo sapiens
actttaccacgacaaa

SEQ ID NO: 85881 - DNA, 21 bp, Homo sapiens
ccccttatttacttaaagaca

SEQ ID NO: 85882 - DNA, 24 bp, Homo sapiens
caagtacaattaaaagaatttctt

SEQ ID NO: 85883 - DNA, 17 bp, Homo sapiens
tgaattactgcaggtgt

SEQ ID NO: 85884 - DNA, 22 bp, Homo sapiens
ttctcttaagtgtaattcatct

SEQ ID NO: 85885 - DNA, 18 bp, Homo sapiens
gcataatctggagttggt

SEQ ID NO: 85886 - DNA, 22 bp, Homo sapiens
aaaaatattttttcaccgacca

SEQ ID NO: 85887 - DNA, 20 bp, Homo sapiens
ttttctttcccctctttagt

SEQ ID NO: 85888 - DNA, 18 bp, Homo sapiens
ttgcgtcatagtacacct

SEQ ID NO: 85889 - DNA, 19 bp, Homo sapiens
acattggcttaaacaaatg

SEQ ID NO: 85890 - DNA, 18 bp, Homo sapiens
tggttctacaatgactgt

SEQ ID NO: 85891 - DNA, 25 bp, Homo sapiens
ttttcctcattttataaatgagaaa

SEQ ID NO: 85892 - DNA, 20 bp, Homo sapiens
caacgttcttttaatttttc

SEQ ID NO: 85893 - DNA, 24 bp, Homo sapiens
ggcagtatcttaatcaaaaaataa

SEQ ID NO: 85894 - DNA, 17 bp, Homo sapiens
gtgccagactgtgagcc

SEQ ID NO: 85895 - DNA, 24 bp, Homo sapiens
tattaccttgttgcctctacccta

SEQ ID NO: 85896 - DNA, 21 bp, Homo sapiens
ccttccagaatactgaaacat

SEQ ID NO: 85897 - DNA, 29 bp, Homo sapiens
aatgtttaaaatgtaaatgattatttaaa

SEQ ID NO: 85898 - DNA, 16 bp, Homo sapiens
gtttgggttggtacca

SEQ ID NO: 85899 - DNA, 18 bp, Homo sapiens
tggcaagaaacacaaaat

SEQ ID NO: 85900 - DNA, 22 bp, Homo sapiens
tccaaataaatactaatttcca

SEQ ID NO: 85901 - DNA, 19 bp, Homo sapiens
ccacttcatcttggaactc

SEQ ID NO: 85902 - DNA, 21 bp, Homo sapiens
ccccctgacaatttaaaaata

SEQ ID NO: 85903 - DNA, 16 bp, Homo sapiens
tggggcctgacccaat

SEQ ID NO: 85904 - DNA, 22 bp, Homo sapiens
tagctgacagattttcttttat

SEQ ID NO: 85905 - DNA, 17 bp, Homo sapiens
cgtcagaacttggtgtt

SEQ ID NO: 85906 - DNA, 18 bp, Homo sapiens
cttgctggcacttcaggt

SEQ ID NO: 85907 - DNA, 17 bp, Homo sapiens
tggcaaagttcagacca

SEQ ID NO: 85908 - DNA, 19 bp, Homo sapiens
actgaaggccttccaaaaa

SEQ ID NO: 85909 - DNA, 22 bp, Homo sapiens
cctcttctaaagataattttat

SEQ ID NO: 85910 - DNA, 24 bp, Homo sapiens
tgattagcctccagctggatagta

SEQ ID NO: 85911 - DNA, 16 bp, Homo sapiens
tgcttcagcctcccaa

SEQ ID NO: 85912 - DNA, 21 bp, Homo sapiens
taatgtaccagatgtcaaaac

SEQ ID NO: 85913 - DNA, 18 bp, Homo sapiens
ttggtgcttaaatccagc

SEQ ID NO: 85914 - DNA, 22 bp, Homo sapiens
tgggtgaagagcaagaccctgc

SEQ ID NO: 85915 - DNA, 19 bp, Homo sapiens
ggttgttggttctaccaaa

SEQ ID NO: 85916 - DNA, 17 bp, Homo sapiens
agagtcaaccacattta

SEQ ID NO: 85917 - DNA, 17 bp, Homo sapiens
ttgcgattcaacagact

SEQ ID NO: 85918 - DNA, 19 bp, Homo sapiens
catgatgagcttaccacag

SEQ ID NO: 85919 - DNA, 19 bp, Homo sapiens
aaagttttgccacttaatt

SEQ ID NO: 85920 - DNA, 21 bp, Homo sapiens
gttttctgtcgtgaacgtttc

SEQ ID NO: 85921 - DNA, 23 bp, Homo sapiens
tttcaaatgagttttaatgtaat

SEQ ID NO: 85922 - DNA, 16 bp, Homo sapiens
tgatttgtccaggagt

SEQ ID NO: 85923 - DNA, 25 bp, Homo sapiens
attactgaatttaattaatggtaag

SEQ ID NO: 85924 - DNA, 18 bp, Homo sapiens
gtctgtgtcaataagagc

SEQ ID NO: 85925 - DNA, 23 bp, Homo sapiens
ctcaaataatgcttaaaggactt

SEQ ID NO: 85926 - DNA, 18 bp, Homo sapiens
tctcctatttactcaccc

SEQ ID NO: 85927 - DNA, 20 bp, Homo sapiens
aatctcaccaatttatggta

SEQ ID NO: 85928 - DNA, 22 bp, Homo sapiens
tttaaaaggaaaatacatacta

SEQ ID NO: 85929 - DNA, 23 bp, Homo sapiens
tatacttaatatggtaatttctt

SEQ ID NO: 85930 - DNA, 22 bp, Homo sapiens
aaaaagatagtcaagtaccata

SEQ ID NO: 85931 - DNA, 19 bp, Homo sapiens
gttgggtttcattgtattt

SEQ ID NO: 85932 - DNA, 18 bp, Homo sapiens
ggtacttctcttgcctcc

SEQ ID NO: 85933 - DNA, 19 bp, Homo sapiens
ggagaagtcagactatcaa

SEQ ID NO: 85934 - DNA, 18 bp, Homo sapiens
cagcagaaaaatgtccct

SEQ ID NO: 85935 - DNA, 16 bp, Homo sapiens
tgggtatcaccactgc

SEQ ID NO: 85936 - DNA, 26 bp, Homo sapiens
aaaaattaaattgctatatttaacaa

SEQ ID NO: 85937 - DNA, 21 bp, Homo sapiens
agattatgaatcagcttgtaa

SEQ ID NO: 85938 - DNA, 20 bp, Homo sapiens
cacgactaaatcacttctaa

SEQ ID NO: 85939 - DNA, 22 bp, Homo sapiens
tggttgacacaattgttttatt

SEQ ID NO: 85940 - DNA, 19 bp, Homo sapiens
gcaaaatgggaaaagtagc

SEQ ID NO: 85941 - DNA, 22 bp, Homo sapiens
aataatgatgattctcttgttc

SEQ ID NO: 85942 - DNA, 22 bp, Homo sapiens
tcatttccactccatattttac

SEQ ID NO: 85943 - DNA, 19 bp, Homo sapiens
ggtgtcttaattaatccac

SEQ ID NO: 85944 - DNA, 19 bp, Homo sapiens
tttgcttctaaccaactga

SEQ ID NO: 85945 - DNA, 20 bp, Homo sapiens
aacaagacaaaaggttggac

SEQ ID NO: 85946 - DNA, 21 bp, Homo sapiens
ggaagaaagatcatgaacccc

SEQ ID NO: 85947 - DNA, 17 bp, Homo sapiens
agaagcctagttaacca

SEQ ID NO: 85948 - DNA, 18 bp, Homo sapiens
gaagttcagcttcggttt

SEQ ID NO: 85949 - DNA, 23 bp, Homo sapiens
catatttttcatataaaggcagc

SEQ ID NO: 85950 - DNA, 18 bp, Homo sapiens
tagatgaagctcataaca

SEQ ID NO: 85951 - DNA, 17 bp, Homo sapiens
gctacagcacacagctc

SEQ ID NO: 85952 - DNA, 24 bp, Homo sapiens
tacaagaaaattcttttatcttat

SEQ ID NO: 85953 - DNA, 18 bp, Homo sapiens
atctagttcatcccgagc

SEQ ID NO: 85954 - DNA, 22 bp, Homo sapiens
gtgaattttaaaatgaaatatc

SEQ ID NO: 85955 - DNA, 16 bp, Homo sapiens
tcccgagcacagtcct

SEQ ID NO: 85956 - DNA, 23 bp, Homo sapiens
ttatttaagacctagaatctctg

SEQ ID NO: 85957 - DNA, 23 bp, Homo sapiens
tttcagatttaaatccatctata

SEQ ID NO: 85958 - DNA, 21 bp, Homo sapiens
cccatgttaggatatgttttc

SEQ ID NO: 85959 - DNA, 18 bp, Homo sapiens
gctgacatcatattttgt

SEQ ID NO: 85960 - DNA, 25 bp, Homo sapiens
ttaaagcaaaaaaaattaaaacatc

SEQ ID NO: 85961 - DNA, 16 bp, Homo sapiens
gtcagcctggggaaga

SEQ ID NO: 85962 - DNA, 23 bp, Homo sapiens
catgagtaggaagaaggttctca

SEQ ID NO: 85963 - DNA, 19 bp, Homo sapiens
tagtgatcagcacacatta

SEQ ID NO: 85964 - DNA, 17 bp, Homo sapiens
agatagttgtagggaca

SEQ ID NO: 85965 - DNA, 22 bp, Homo sapiens
gttatgcatatttgtttctagg

SEQ ID NO: 85966 - DNA, 17 bp, Homo sapiens
aatatggacaggccttt

SEQ ID NO: 85967 - DNA, 20 bp, Homo sapiens
caaattctgagataagctta

SEQ ID NO: 85968 - DNA, 23 bp, Homo sapiens
caggctttgcacatcccttggaa

SEQ ID NO: 85969 - DNA, 16 bp, Homo sapiens
aggtgtggtggcgtag

SEQ ID NO: 85970 - DNA, 19 bp, Homo sapiens
aatagcaggattttcccta

SEQ ID NO: 85971 - DNA, 25 bp, Homo sapiens
taaagattttattacaggaaaattg

SEQ ID NO: 85972 - DNA, 18 bp, Homo sapiens
agtcggtaacttcaacag

SEQ ID NO: 85973 - DNA, 21 bp, Homo sapiens
tttccgaagttgattatcact

SEQ ID NO: 85974 - DNA, 18 bp, Homo sapiens
tcaggggttccaatgact

SEQ ID NO: 85975 - DNA, 20 bp, Homo sapiens
ttttcagccttattttttct

SEQ ID NO: 85976 - DNA, 16 bp, Homo sapiens
acgcacacacaagcag

SEQ ID NO: 85977 - DNA, 18 bp, Homo sapiens
ccatgcacttctcatttc

SEQ ID NO: 85978 - DNA, 22 bp, Homo sapiens
gtcatcgaataccattaagaag

SEQ ID NO: 85979 - DNA, 16 bp, Homo sapiens
tccctgctggaaagaa

SEQ ID NO: 85980 - DNA, 16 bp, Homo sapiens
ccctggccactgttct

SEQ ID NO: 85981 - DNA, 16 bp, Homo sapiens
tctgagcaatctgctt

SEQ ID NO: 85982 - DNA, 19 bp, Homo sapiens
tgtgaggtttgataacgtt

SEQ ID NO: 85983 - DNA, 17 bp, Homo sapiens
ttccctgtatgatcctt

SEQ ID NO: 85984 - DNA, 25 bp, Homo sapiens
taatttcttgttatttctctttatt

SEQ ID NO: 85985 - DNA, 18 bp, Homo sapiens
acaacagcacctagaaca

SEQ ID NO: 85986 - DNA, 23 bp, Homo sapiens
aataggctttgccatctcacaca

SEQ ID NO: 85987 - DNA, 16 bp, Homo sapiens
actcaactctccactg

SEQ ID NO: 85988 - DNA, 21 bp, Homo sapiens
gggttgctactgtcctttgta

SEQ ID NO: 85989 - DNA, 18 bp, Homo sapiens
aacgtcattgctttggaa

SEQ ID NO: 85990 - DNA, 18 bp, Homo sapiens
tccatatcttccttcttt

SEQ ID NO: 85991 - DNA, 19 bp, Homo sapiens
agccagttaaacttctagt

SEQ ID NO: 85992 - DNA, 20 bp, Homo sapiens
aaaggagtttatcttttcca

SEQ ID NO: 85993 - DNA, 16 bp, Homo sapiens
tttggatgcaggaaaa

SEQ ID NO: 85994 - DNA, 18 bp, Homo sapiens
tgcatccaaattgtgtac

SEQ ID NO: 85995 - DNA, 17 bp, Homo sapiens
tgaggtgcttatttgca

SEQ ID NO: 85996 - DNA, 18 bp, Homo sapiens
gaagaaaagaattcgacc

SEQ ID NO: 85997 - DNA, 16 bp, Homo sapiens
tggctgtcacatgacc

SEQ ID NO: 85998 - DNA, 20 bp, Homo sapiens
tgcaaagttatctgctaaga

SEQ ID NO: 85999 - DNA, 22 bp, Homo sapiens
tacttgactaccatgttcagct

SEQ ID NO: 86000 - DNA, 22 bp, Homo sapiens
ttatgctgttttttttaaatta

SEQ ID NO: 86001 - DNA, 19 bp, Homo sapiens
tgctgtgtagtttctaagg

SEQ ID NO: 86002 - DNA, 16 bp, Homo sapiens
agccttacatcctggt

SEQ ID NO: 86003 - DNA, 16 bp, Homo sapiens
atatggatgcctgttt

SEQ ID NO: 86004 - DNA, 22 bp, Homo sapiens
gtagagaagtactttttaaaca

SEQ ID NO: 86005 - DNA, 22 bp, Homo sapiens
tctatggatttttgaccactct

SEQ ID NO: 86006 - DNA, 16 bp, Homo sapiens
tccaagcacaccacct

SEQ ID NO: 86007 - DNA, 20 bp, Homo sapiens
tcagttatgctaaccaaact

SEQ ID NO: 86008 - DNA, 20 bp, Homo sapiens
tgtgcatgccattcaaagga

SEQ ID NO: 86009 - DNA, 19 bp, Homo sapiens
acagatatcaactgaccca

SEQ ID NO: 86010 - DNA, 17 bp, Homo sapiens
aaccagcagatgagggc

SEQ ID NO: 86011 - DNA, 19 bp, Homo sapiens
gccatttctttcagaaggt

SEQ ID NO: 86012 - DNA, 25 bp, Homo sapiens
ctgtagagaatgattgatgtttatt

SEQ ID NO: 86013 - DNA, 23 bp, Homo sapiens
cttggttcatgtcattgtttgta

SEQ ID NO: 86014 - DNA, 19 bp, Homo sapiens
gtgttagccctaaaaatct

SEQ ID NO: 86015 - DNA, 22 bp, Homo sapiens
gtacttcagctttttcacttac

SEQ ID NO: 86016 - DNA, 21 bp, Homo sapiens
ttgaaactcttttggaagatt

SEQ ID NO: 86017 - DNA, 18 bp, Homo sapiens
aagtggaaaaagcttagc

SEQ ID NO: 86018 - DNA, 22 bp, Homo sapiens
agttagcgacagcatggctgaa

SEQ ID NO: 86019 - DNA, 22 bp, Homo sapiens
gttcatagattctcagaggatt

SEQ ID NO: 86020 - DNA, 20 bp, Homo sapiens
atcccagtaagtaacctgaa

SEQ ID NO: 86021 - DNA, 18 bp, Homo sapiens
cagatggagagagacctt

SEQ ID NO: 86022 - DNA, 20 bp, Homo sapiens
tgctaaagcagaacaaagta

SEQ ID NO: 86023 - DNA, 17 bp, Homo sapiens
gctattgttgtgttccc

SEQ ID NO: 86024 - DNA, 18 bp, Homo sapiens
tgcttgctgtttaatcct

SEQ ID NO: 86025 - DNA, 23 bp, Homo sapiens
ctgcaatcagtagtttcccagag

SEQ ID NO: 86026 - DNA, 18 bp, Homo sapiens
tggggtgaagatttactt

SEQ ID NO: 86027 - DNA, 20 bp, Homo sapiens
tgagaatatgaatgcagtca

SEQ ID NO: 86028 - DNA, 23 bp, Homo sapiens
ttaggaatctgaaataaacagga

SEQ ID NO: 86029 - DNA, 23 bp, Homo sapiens
aataaaaacttaactgctgaaaa

SEQ ID NO: 86030 - DNA, 19 bp, Homo sapiens
ttttggttctctggttttc

SEQ ID NO: 86031 - DNA, 20 bp, Homo sapiens
gacgggtaagctttataagg

SEQ ID NO: 86032 - DNA, 24 bp, Homo sapiens
ccatttgttttgtttatactttta

SEQ ID NO: 86033 - DNA, 17 bp, Homo sapiens
tatgaaggccggattct

SEQ ID NO: 86034 - DNA, 19 bp, Homo sapiens
gtcttcttcattggtttaa

SEQ ID NO: 86035 - DNA, 16 bp, Homo sapiens
gtttgcctgtggagcg

SEQ ID NO: 86036 - DNA, 16 bp, Homo sapiens
caagagcttcgggctc

SEQ ID NO: 86037 - DNA, 18 bp, Homo sapiens
gtttaccaagaagctttt

SEQ ID NO: 86038 - DNA, 17 bp, Homo sapiens
ccgctccactttgccca

SEQ ID NO: 86039 - DNA, 16 bp, Homo sapiens
aggatacctcagtcct

SEQ ID NO: 86040 - DNA, 22 bp, Homo sapiens
cctcccagatctcctcaaacac

SEQ ID NO: 86041 - DNA, 16 bp, Homo sapiens
tgccgtcttaaagcag

SEQ ID NO: 86042 - DNA, 18 bp, Homo sapiens
agaaatgagaagggagcc

SEQ ID NO: 86043 - DNA, 24 bp, Homo sapiens
aggatgctgaaggctcagagcttg

SEQ ID NO: 86044 - DNA, 20 bp, Homo sapiens
cacctaggtctgctcagcca

SEQ ID NO: 86045 - DNA, 18 bp, Homo sapiens
cagtgagttggttgtcac

SEQ ID NO: 86046 - DNA, 24 bp, Homo sapiens
gcaaacaaactgagagcagaaaaa

SEQ ID NO: 86047 - DNA, 20 bp, Homo sapiens
attccatcttattttcagtc

SEQ ID NO: 86048 - DNA, 18 bp, Homo sapiens
gctctttaaagtggccca

SEQ ID NO: 86049 - DNA, 16 bp, Homo sapiens
cgtgtgtgtttgcttt

SEQ ID NO: 86050 - DNA, 19 bp, Homo sapiens
tcttccccacagaaaaagt

SEQ ID NO: 86051 - DNA, 18 bp, Homo sapiens
ctttgggtttacaattgc

SEQ ID NO: 86052 - DNA, 16 bp, Homo sapiens
cagtttctttggctct

SEQ ID NO: 86053 - DNA, 24 bp, Homo sapiens
tgtcggcaggacatggatggcaac

SEQ ID NO: 86054 - DNA, 16 bp, Homo sapiens
gacgggagccacaccc

SEQ ID NO: 86055 - DNA, 22 bp, Homo sapiens
agtgattttaaaaaccaaaaaa

SEQ ID NO: 86056 - DNA, 16 bp, Homo sapiens
tgtcctcaggtgctgt

SEQ ID NO: 86057 - DNA, 18 bp, Homo sapiens
aacataaagcactcggca

SEQ ID NO: 86058 - DNA, 19 bp, Homo sapiens
ttttctgtctgcttttcaa

SEQ ID NO: 86059 - DNA, 23 bp, Homo sapiens
ggagccaggcttggattggagaa

SEQ ID NO: 86060 - DNA, 16 bp, Homo sapiens
tggttgggtctccgta

SEQ ID NO: 86061 - DNA, 22 bp, Homo sapiens
gtccctctgctgactggccaca

SEQ ID NO: 86062 - DNA, 24 bp, Homo sapiens
gaacaatttctagaagctggaaag

SEQ ID NO: 86063 - DNA, 16 bp, Homo sapiens
ggcctgtcgcaggcta

SEQ ID NO: 86064 - DNA, 24 bp, Homo sapiens
ttctcatgggagggtttgagaccc

SEQ ID NO: 86065 - DNA, 20 bp, Homo sapiens
cacccaggaccctgcgatgc

SEQ ID NO: 86066 - DNA, 24 bp, Homo sapiens
gtctccacccaaacccaatccctg

SEQ ID NO: 86067 - DNA, 19 bp, Homo sapiens
caccatctgtgggggggca

SEQ ID NO: 86068 - DNA, 24 bp, Homo sapiens
tttgggggcttcgacacctcagct

SEQ ID NO: 86069 - DNA, 18 bp, Homo sapiens
agcacaaaaaaggcctac

SEQ ID NO: 86070 - DNA, 16 bp, Homo sapiens
tggggtcaggggaggc

SEQ ID NO: 86071 - DNA, 19 bp, Homo sapiens
ctaacccagtttctttcct

SEQ ID NO: 86072 - DNA, 18 bp, Homo sapiens
ggggtgcccgctgttgcc

SEQ ID NO: 86073 - DNA, 24 bp, Homo sapiens
tagttttttttttaactctctctc

SEQ ID NO: 86074 - DNA, 22 bp, Homo sapiens
ggagacgagcgggcagactcca

SEQ ID NO: 86075 - DNA, 19 bp, Homo sapiens
agaccacaaaaatgtcatg

SEQ ID NO: 86076 - DNA, 16 bp, Homo sapiens
agtgagcggcagagca

SEQ ID NO: 86077 - DNA, 16 bp, Homo sapiens
aggagcaaatagtcac

SEQ ID NO: 86078 - DNA, 23 bp, Homo sapiens
ctggggccctgcagcttccccgg

SEQ ID NO: 86079 - DNA, 24 bp, Homo sapiens
cacaatacctccgtactgagtgcc

SEQ ID NO: 86080 - DNA, 19 bp, Homo sapiens
gaaaggcacggagccgggc

SEQ ID NO: 86081 - DNA, 21 bp, Homo sapiens
cctatggggcttgggcttgct

SEQ ID NO: 86082 - DNA, 18 bp, Homo sapiens
gtggttcttggttcccca

SEQ ID NO: 86083 - DNA, 21 bp, Homo sapiens
gcgacctgtctccttcctccc

SEQ ID NO: 86084 - DNA, 20 bp, Homo sapiens
ttgctgaattgtctgattct

SEQ ID NO: 86085 - DNA, 20 bp, Homo sapiens
ccttccctggcgggcagggc

SEQ ID NO: 86086 - DNA, 24 bp, Homo sapiens
agagtgcacggccgggtgagggtg

SEQ ID NO: 86087 - DNA, 16 bp, Homo sapiens
ctgcctctgctgccgc

SEQ ID NO: 86088 - DNA, 24 bp, Homo sapiens
cgaaagacccatgcacctgctccc

SEQ ID NO: 86089 - DNA, 24 bp, Homo sapiens
tattactgctactcgaaatgcaaa

SEQ ID NO: 86090 - DNA, 24 bp, Homo sapiens
aactaaatgcctgtaatgcggctc

SEQ ID NO: 86091 - DNA, 23 bp, Homo sapiens
gagatcgaggcggaggccacgca

SEQ ID NO: 86092 - DNA, 24 bp, Homo sapiens
agacaagccccacacgggacactg

SEQ ID NO: 86093 - DNA, 19 bp, Homo sapiens
acgaagcatgtccaccacc

SEQ ID NO: 86094 - DNA, 23 bp, Homo sapiens
atggtttccggagccttggagtg

SEQ ID NO: 86095 - DNA, 16 bp, Homo sapiens
cctcgccgggcgcctg

SEQ ID NO: 86096 - DNA, 24 bp, Homo sapiens
ccagggcagaagcagtgcacccgc

SEQ ID NO: 86097 - DNA, 21 bp, Homo sapiens
caccaccaccaccattcgcag

SEQ ID NO: 86098 - DNA, 20 bp, Homo sapiens
catggtggtggatgtagtgg

SEQ ID NO: 86099 - DNA, 18 bp, Homo sapiens
ctgccagtctccaggcgt

SEQ ID NO: 86100 - DNA, 24 bp, Homo sapiens
aagcctttgcccccgaggaggggg

SEQ ID NO: 86101 - DNA, 18 bp, Homo sapiens
gaggaagacccgcagacg

SEQ ID NO: 86102 - DNA, 22 bp, Homo sapiens
caccgggcgggagcagggagtg

SEQ ID NO: 86103 - DNA, 16 bp, Homo sapiens
ttcgcgggagggggcg

SEQ ID NO: 86104 - DNA, 16 bp, Homo sapiens
ctatagcggcctacgc

SEQ ID NO: 86105 - DNA, 22 bp, Homo sapiens
ctgggtcacttctccttctgac

SEQ ID NO: 86106 - DNA, 24 bp, Homo sapiens
ggacaggtgatcgtccagtatcgt

SEQ ID NO: 86107 - DNA, 24 bp, Homo sapiens
gcgtgctcctgcgtagggagccga

SEQ ID NO: 86108 - DNA, 21 bp, Homo sapiens
ggggtgctgcgtgggcgcccc

SEQ ID NO: 86109 - DNA, 22 bp, Homo sapiens
ttgtgtaggcgggcctgtgcgt

SEQ ID NO: 86110 - DNA, 20 bp, Homo sapiens
gagcgcctgcagcagatccg

SEQ ID NO: 86111 - DNA, 24 bp, Homo sapiens
cacccacacgcagcccacgcgcat

SEQ ID NO: 86112 - DNA, 24 bp, Homo sapiens
tgcagctgagctgatctcgaggct

SEQ ID NO: 86113 - DNA, 16 bp, Homo sapiens
cacatgcgcatacaca

SEQ ID NO: 86114 - DNA, 16 bp, Homo sapiens
acccaccgcctgccca

SEQ ID NO: 86115 - DNA, 21 bp, Homo sapiens
taggccgcattacctctcgga

SEQ ID NO: 86116 - DNA, 24 bp, Homo sapiens
tccggccaagccaccgcccaccta

SEQ ID NO: 86117 - DNA, 24 bp, Homo sapiens
ccaactccagcttcagcttttcca

SEQ ID NO: 86118 - DNA, 16 bp, Homo sapiens
cactctacacccgaac

SEQ ID NO: 86119 - DNA, 22 bp, Homo sapiens
acgggggtcatctccttgggca

SEQ ID NO: 86120 - DNA, 21 bp, Homo sapiens
aaaccatgtaatgcctattgt

SEQ ID NO: 86121 - DNA, 16 bp, Homo sapiens
cgcagtgtgaaggcca

SEQ ID NO: 86122 - DNA, 18 bp, Homo sapiens
ctcttttctaccttccct

SEQ ID NO: 86123 - DNA, 19 bp, Homo sapiens
ccttagagatggaattcct

SEQ ID NO: 86124 - DNA, 23 bp, Homo sapiens
ttaggactcaacatggcagaaaa

SEQ ID NO: 86125 - DNA, 16 bp, Homo sapiens
cccatgtgatgtgctg

SEQ ID NO: 86126 - DNA, 21 bp, Homo sapiens
gaggtagagacacttggccat

SEQ ID NO: 86127 - DNA, 16 bp, Homo sapiens
acactcctatggaagc

SEQ ID NO: 86128 - DNA, 17 bp, Homo sapiens
cacacgataaggaggaa

SEQ ID NO: 86129 - DNA, 17 bp, Homo sapiens
tacccttgtcatactcc

SEQ ID NO: 86130 - DNA, 18 bp, Homo sapiens
aacgacagtgagatatcc

SEQ ID NO: 86131 - DNA, 17 bp, Homo sapiens
cagctgaggatgacaga

SEQ ID NO: 86132 - DNA, 20 bp, Homo sapiens
atcctgttaatccttatcac

SEQ ID NO: 86133 - DNA, 20 bp, Homo sapiens
caagcaagcccacggaaggg

SEQ ID NO: 86134 - DNA, 17 bp, Homo sapiens
gagggtcagtgactgaa

SEQ ID NO: 86135 - DNA, 18 bp, Homo sapiens
aatcatccgtcagcgcat

SEQ ID NO: 86136 - DNA, 17 bp, Homo sapiens
agattgtgggatagtgt

SEQ ID NO: 86137 - DNA, 24 bp, Homo sapiens
aagacatagccagaacctatgtga

SEQ ID NO: 86138 - DNA, 17 bp, Homo sapiens
ttgtggcccctgctttc

SEQ ID NO: 86139 - DNA, 16 bp, Homo sapiens
gtgtgaggtccacgga

SEQ ID NO: 86140 - DNA, 22 bp, Homo sapiens
catggccagcagtcctaactca

SEQ ID NO: 86141 - DNA, 21 bp, Homo sapiens
aagtgcaaactttcgccaacc

SEQ ID NO: 86142 - DNA, 21 bp, Homo sapiens
caccatacttaaaacatctgc

SEQ ID NO: 86143 - DNA, 17 bp, Homo sapiens
gtgtggctatctcccca

SEQ ID NO: 86144 - DNA, 22 bp, Homo sapiens
ttacctgtatccactgtcaaca

SEQ ID NO: 86145 - DNA, 20 bp, Homo sapiens
tgaggagtgggggagaaaac

SEQ ID NO: 86146 - DNA, 16 bp, Homo sapiens
caagccaaccacggtt

SEQ ID NO: 86147 - DNA, 17 bp, Homo sapiens
gatggaggaaaatgcct

SEQ ID NO: 86148 - DNA, 18 bp, Homo sapiens
ctcttcttcattcaaggt

SEQ ID NO: 86149 - DNA, 17 bp, Homo sapiens
caagaagcagcagattg

SEQ ID NO: 86150 - DNA, 21 bp, Homo sapiens
attactcatgtaagctgtgtt

SEQ ID NO: 86151 - DNA, 21 bp, Homo sapiens
tgagaacaacagcattgtctc

SEQ ID NO: 86152 - DNA, 21 bp, Homo sapiens
agtcaaaaacatctggtaggc

SEQ ID NO: 86153 - DNA, 18 bp, Homo sapiens
acctgaaggataccaaaa

SEQ ID NO: 86154 - DNA, 22 bp, Homo sapiens
cctggtcaaacatgatggaatc

SEQ ID NO: 86155 - DNA, 17 bp, Homo sapiens
ggagaaatgcgtggata

SEQ ID NO: 86156 - DNA, 22 bp, Homo sapiens
tggcaggcttcagctgcttgga

SEQ ID NO: 86157 - DNA, 19 bp, Homo sapiens
tccttacactccttattgg

SEQ ID NO: 86158 - DNA, 21 bp, Homo sapiens
gctttggctactcgtaaagtt

SEQ ID NO: 86159 - DNA, 21 bp, Homo sapiens
agatgggttgggggagccgga

SEQ ID NO: 86160 - DNA, 20 bp, Homo sapiens
gcaaaccagaagtctaaggt

SEQ ID NO: 86161 - DNA, 17 bp, Homo sapiens
gcaagggccaggtcacc

SEQ ID NO: 86162 - DNA, 24 bp, Homo sapiens
caggtaagcaccgtcttgatcgcc

SEQ ID NO: 86163 - DNA, 22 bp, Homo sapiens
gatgccccgcggcccccagtgc

SEQ ID NO: 86164 - DNA, 24 bp, Homo sapiens
gaggggaatccggagatgcccgcc

SEQ ID NO: 86165 - DNA, 21 bp, Homo sapiens
caccatgagtagcgctatgtt

SEQ ID NO: 86166 - DNA, 18 bp, Homo sapiens
acaggcatgggtttggtg

SEQ ID NO: 86167 - DNA, 24 bp, Homo sapiens
acgccgattgctgagaggaactgg

SEQ ID NO: 86168 - DNA, 20 bp, Homo sapiens
gtctccccttcttcccctgg

SEQ ID NO: 86169 - DNA, 24 bp, Homo sapiens
ttttctttccagagaggaggttca

SEQ ID NO: 86170 - DNA, 21 bp, Homo sapiens
tccgggaggcaagtcaccaac

SEQ ID NO: 86171 - DNA, 17 bp, Homo sapiens
gtgcctcctcactggcg

SEQ ID NO: 86172 - DNA, 22 bp, Homo sapiens
tacttagaaaaaaatccctgtg

SEQ ID NO: 86173 - DNA, 16 bp, Homo sapiens
tttgagcagcgcttga

SEQ ID NO: 86174 - DNA, 22 bp, Homo sapiens
agattgacattttgctttatag

SEQ ID NO: 86175 - DNA, 16 bp, Homo sapiens
ttccctgaggaatgcc

SEQ ID NO: 86176 - DNA, 19 bp, Homo sapiens
tctggcagtaccgccgcca

SEQ ID NO: 86177 - DNA, 18 bp, Homo sapiens
taacaactgtcacaatca

SEQ ID NO: 86178 - DNA, 18 bp, Homo sapiens
tccagaagcataacattc

SEQ ID NO: 86179 - DNA, 21 bp, Homo sapiens
tcagattccttttcttccaaa

SEQ ID NO: 86180 - DNA, 17 bp, Homo sapiens
cgacctgagagacccat

SEQ ID NO: 86181 - DNA, 19 bp, Homo sapiens
aaattactacaaatgcctt

SEQ ID NO: 86182 - DNA, 17 bp, Homo sapiens
actctctttttttcccc

SEQ ID NO: 86183 - DNA, 16 bp, Homo sapiens
tacgagtgcctgcttt

SEQ ID NO: 86184 - DNA, 19 bp, Homo sapiens
aatggaagaagagattgga

SEQ ID NO: 86185 - DNA, 16 bp, Homo sapiens
gtcgcctcctaccttt

SEQ ID NO: 86186 - DNA, 22 bp, Homo sapiens
ctttacatgccgaaggatctca

SEQ ID NO: 86187 - DNA, 17 bp, Homo sapiens
ctaacataggatgccgc

SEQ ID NO: 86188 - DNA, 18 bp, Homo sapiens
agattcagaatctgcaga

SEQ ID NO: 86189 - DNA, 17 bp, Homo sapiens
gactagatgaccaccaa

SEQ ID NO: 86190 - DNA, 16 bp, Homo sapiens
acccaacccagtggtt

SEQ ID NO: 86191 - DNA, 18 bp, Homo sapiens
attgtacaggatggatga

SEQ ID NO: 86192 - DNA, 20 bp, Homo sapiens
aggtctacacggaggaagat

SEQ ID NO: 86193 - DNA, 16 bp, Homo sapiens
aagcggccattgtctt

SEQ ID NO: 86194 - DNA, 17 bp, Homo sapiens
acaaagcagtcttgttt

SEQ ID NO: 86195 - DNA, 19 bp, Homo sapiens
cctgttcctaccttctctc

SEQ ID NO: 86196 - DNA, 18 bp, Homo sapiens
acgtgaaatgtttttggt

SEQ ID NO: 86197 - DNA, 21 bp, Homo sapiens
caagtgttgaaaacaatttgg

SEQ ID NO: 86198 - DNA, 18 bp, Homo sapiens
ccaaaagattacaagaca

SEQ ID NO: 86199 - DNA, 18 bp, Homo sapiens
taaagaccccagactgtc

SEQ ID NO: 86200 - DNA, 23 bp, Homo sapiens
gttttcacatcttgatgataatg

SEQ ID NO: 86201 - DNA, 18 bp, Homo sapiens
agtaagggtgtgatccca

SEQ ID NO: 86202 - DNA, 17 bp, Homo sapiens
ctcctgcgataaaggag

SEQ ID NO: 86203 - DNA, 24 bp, Homo sapiens
gagctcttagtaattgttcaccag

SEQ ID NO: 86204 - DNA, 16 bp, Homo sapiens
ctcctctcccgtaaca

SEQ ID NO: 86205 - DNA, 17 bp, Homo sapiens
cggaagagacatgtgaa

SEQ ID NO: 86206 - DNA, 19 bp, Homo sapiens
ggtaggatcaaagaggaaa

SEQ ID NO: 86207 - DNA, 16 bp, Homo sapiens
tgccatgttttcggtc

SEQ ID NO: 86208 - DNA, 24 bp, Homo sapiens
tctcagaaaatcttaatttaaaag

SEQ ID NO: 86209 - DNA, 27 bp, Homo sapiens
ttaattctatgacttttaaaatatgtt

SEQ ID NO: 86210 - DNA, 18 bp, Homo sapiens
ccgtctctccttgatcaa

SEQ ID NO: 86211 - DNA, 16 bp, Homo sapiens
aacacactctcacagt

SEQ ID NO: 86212 - DNA, 17 bp, Homo sapiens
gcgatcaatacattggc

SEQ ID NO: 86213 - DNA, 22 bp, Homo sapiens
aatttctttctttaatttggaa

SEQ ID NO: 86214 - DNA, 18 bp, Homo sapiens
aaatctgacatacaaggg

SEQ ID NO: 86215 - DNA, 19 bp, Homo sapiens
aggggataacttctatgtg

SEQ ID NO: 86216 - DNA, 22 bp, Homo sapiens
cagaaatcacctattcttctct

SEQ ID NO: 86217 - DNA, 16 bp, Homo sapiens
tccaaagctccctcct

SEQ ID NO: 86218 - DNA, 22 bp, Homo sapiens
acaaagttcaggattgtgacct

SEQ ID NO: 86219 - DNA, 18 bp, Homo sapiens
ttcacatttgtctttgct

SEQ ID NO: 86220 - DNA, 26 bp, Homo sapiens
tttgtatctagaaaataaactttttt

SEQ ID NO: 86221 - DNA, 17 bp, Homo sapiens
caccatggtctcttacc

SEQ ID NO: 86222 - DNA, 17 bp, Homo sapiens
agtgttggggaaggagg

SEQ ID NO: 86223 - DNA, 24 bp, Homo sapiens
tttttaatttggtaatattcaaac

SEQ ID NO: 86224 - DNA, 17 bp, Homo sapiens
agagcagccactgtcaa

SEQ ID NO: 86225 - DNA, 20 bp, Homo sapiens
aaaagaaaaatattcgctta

SEQ ID NO: 86226 - DNA, 22 bp, Homo sapiens
gctatagaagaatcctcatggt

SEQ ID NO: 86227 - DNA, 28 bp, Homo sapiens
aatgaattagttaaaattaaactttcct

SEQ ID NO: 86228 - DNA, 20 bp, Homo sapiens
actcacctaaaatagagact

SEQ ID NO: 86229 - DNA, 24 bp, Homo sapiens
gttttaaaatttatttgaaactta

SEQ ID NO: 86230 - DNA, 20 bp, Homo sapiens
catccaattctaattcaggg

SEQ ID NO: 86231 - DNA, 18 bp, Homo sapiens
tggggatatcacttttgt

SEQ ID NO: 86232 - DNA, 16 bp, Homo sapiens
tgtcttttcaggggga

SEQ ID NO: 86233 - DNA, 23 bp, Homo sapiens
gaagatgtatgaggaattcctta

SEQ ID NO: 86234 - DNA, 23 bp, Homo sapiens
gagaatcctgctcagactagagg

SEQ ID NO: 86235 - DNA, 18 bp, Homo sapiens
ggttccaatgcatcagct

SEQ ID NO: 86236 - DNA, 23 bp, Homo sapiens
ctagaatgttgaatgggcatggc

SEQ ID NO: 86237 - DNA, 16 bp, Homo sapiens
gaactcatcccctggt

SEQ ID NO: 86238 - DNA, 19 bp, Homo sapiens
aacagcaccaaataataca

SEQ ID NO: 86239 - DNA, 19 bp, Homo sapiens
ttctgagttctttacctct

SEQ ID NO: 86240 - DNA, 17 bp, Homo sapiens
tgggaacgtcttacggt

SEQ ID NO: 86241 - DNA, 18 bp, Homo sapiens
ttcagaattagcccactc

SEQ ID NO: 86242 - DNA, 17 bp, Homo sapiens
ggtgcagggagaaccag

SEQ ID NO: 86243 - DNA, 19 bp, Homo sapiens
agcatttcaaagtaaaaga

SEQ ID NO: 86244 - DNA, 23 bp, Homo sapiens
gctggtaaaatagaaattgaagc

SEQ ID NO: 86245 - DNA, 16 bp, Homo sapiens
cccacttcaacaaact

SEQ ID NO: 86246 - DNA, 18 bp, Homo sapiens
tgcaaggtagttaaaatt

SEQ ID NO: 86247 - DNA, 22 bp, Homo sapiens
gacttaaagaaaccatgtattt

SEQ ID NO: 86248 - DNA, 19 bp, Homo sapiens
tgtttgtttagctttttgg

SEQ ID NO: 86249 - DNA, 22 bp, Homo sapiens
agaaaataaaattcaggagaag

SEQ ID NO: 86250 - DNA, 23 bp, Homo sapiens
caacgtcggtcagaaaatgaaga

SEQ ID NO: 86251 - DNA, 22 bp, Homo sapiens
gagtaaagatcaaaatctcaca

SEQ ID NO: 86252 - DNA, 22 bp, Homo sapiens
tttttggctctgagagggaagg

SEQ ID NO: 86253 - DNA, 16 bp, Homo sapiens
aaggggccacgagcaa

SEQ ID NO: 86254 - DNA, 21 bp, Homo sapiens
attgtctcatatctattgtct

SEQ ID NO: 86255 - DNA, 16 bp, Homo sapiens
gtctgagcatgggcca

SEQ ID NO: 86256 - DNA, 19 bp, Homo sapiens
tagcctgttacccatcttt

SEQ ID NO: 86257 - DNA, 18 bp, Homo sapiens
ggcagatttcagacagac

SEQ ID NO: 86258 - DNA, 16 bp, Homo sapiens
ctcgtgctgccacagt

SEQ ID NO: 86259 - DNA, 19 bp, Homo sapiens
aaataaagcagtttgcatg

SEQ ID NO: 86260 - DNA, 22 bp, Homo sapiens
gacctagatttgaacgtgttct

SEQ ID NO: 86261 - DNA, 23 bp, Homo sapiens
tcaatatataaacagacaggaag

SEQ ID NO: 86262 - DNA, 19 bp, Homo sapiens
agttttgtgtcactgtctg

SEQ ID NO: 86263 - DNA, 19 bp, Homo sapiens
ttagaaccatctactgggg

SEQ ID NO: 86264 - DNA, 24 bp, Homo sapiens
ctagagttcggccccagtgcctta

SEQ ID NO: 86265 - DNA, 19 bp, Homo sapiens
aatctgccagtctaattgt

SEQ ID NO: 86266 - DNA, 20 bp, Homo sapiens
ttggtgtgagtttgggtttc

SEQ ID NO: 86267 - DNA, 16 bp, Homo sapiens
gtggcccctcttgggg

SEQ ID NO: 86268 - DNA, 20 bp, Homo sapiens
cttgaaaattttgtgaaaca

SEQ ID NO: 86269 - DNA, 16 bp, Homo sapiens
tcccctgggctaaggc

SEQ ID NO: 86270 - DNA, 18 bp, Homo sapiens
tgtgttctgatgtgtgtc

SEQ ID NO: 86271 - DNA, 17 bp, Homo sapiens
agacaggcatcattact

SEQ ID NO: 86272 - DNA, 21 bp, Homo sapiens
atgtctaacaattttccttgc

SEQ ID NO: 86273 - DNA, 20 bp, Homo sapiens
gcaaatgtttcactctctcc

SEQ ID NO: 86274 - DNA, 19 bp, Homo sapiens
gcttcagaaattggagaca

SEQ ID NO: 86275 - DNA, 25 bp, Homo sapiens
tattaaagaatccaattcatctttt

SEQ ID NO: 86276 - DNA, 20 bp, Homo sapiens
ctattacgaatacaccaaca

SEQ ID NO: 86277 - DNA, 20 bp, Homo sapiens
tctctgtatggtaacacatt

SEQ ID NO: 86278 - DNA, 23 bp, Homo sapiens
gtttgatgtgccatagacaaggt

SEQ ID NO: 86279 - DNA, 16 bp, Homo sapiens
gccaccatagagggta

SEQ ID NO: 86280 - DNA, 19 bp, Homo sapiens
gtaaagaagctgaaggaga

SEQ ID NO: 86281 - DNA, 20 bp, Homo sapiens
gagcacaaattaaattaccc

SEQ ID NO: 86282 - DNA, 21 bp, Homo sapiens
acaaatggagctcatcctagt

SEQ ID NO: 86283 - DNA, 17 bp, Homo sapiens
tcttccagaaattccca

SEQ ID NO: 86284 - DNA, 24 bp, Homo sapiens
ttctaggtctgatgtatgacatgg

SEQ ID NO: 86285 - DNA, 16 bp, Homo sapiens
ctccagagacgggcat

SEQ ID NO: 86286 - DNA, 19 bp, Homo sapiens
tggggattgtaatactgag

SEQ ID NO: 86287 - DNA, 17 bp, Homo sapiens
caaacgcatactgacaa

SEQ ID NO: 86288 - DNA, 23 bp, Homo sapiens
gtgtcttgcataatgtgacacat

SEQ ID NO: 86289 - DNA, 19 bp, Homo sapiens
tccaggtgatacaactcgt

SEQ ID NO: 86290 - DNA, 19 bp, Homo sapiens
aaggatttcctcatgtgat

SEQ ID NO: 86291 - DNA, 22 bp, Homo sapiens
aacactattgagatccttttcc

SEQ ID NO: 86292 - DNA, 24 bp, Homo sapiens
taaaacatgttaaatattgtcagt

SEQ ID NO: 86293 - DNA, 19 bp, Homo sapiens
ccttatttaaagtcgcggg

SEQ ID NO: 86294 - DNA, 21 bp, Homo sapiens
tgaatccatatcactacgaac

SEQ ID NO: 86295 - DNA, 24 bp, Homo sapiens
atttgaatacttagttatgtattg

SEQ ID NO: 86296 - DNA, 21 bp, Homo sapiens
aagaaacagattacctaccat

SEQ ID NO: 86297 - DNA, 18 bp, Homo sapiens
tggttcatgaacttttgt

SEQ ID NO: 86298 - DNA, 23 bp, Homo sapiens
aattctaggtcaacaaaaaaaca

SEQ ID NO: 86299 - DNA, 24 bp, Homo sapiens
tggaaaatactttcattgtaatga

SEQ ID NO: 86300 - DNA, 18 bp, Homo sapiens
tttccaaagcagtaagtt

SEQ ID NO: 86301 - DNA, 20 bp, Homo sapiens
tctcaggattaacactgcag

SEQ ID NO: 86302 - DNA, 20 bp, Homo sapiens
tggtaaagtagtatgctttt

SEQ ID NO: 86303 - DNA, 17 bp, Homo sapiens
tggctgtccctcaaagt

SEQ ID NO: 86304 - DNA, 24 bp, Homo sapiens
gtaattgattttaggtgttattat

SEQ ID NO: 86305 - DNA, 16 bp, Homo sapiens
tgcacgattacttggt

SEQ ID NO: 86306 - DNA, 23 bp, Homo sapiens
ggaatagaagcttataaaaattt

SEQ ID NO: 86307 - DNA, 18 bp, Homo sapiens
gtgctggtagcattagac

SEQ ID NO: 86308 - DNA, 21 bp, Homo sapiens
gaaggatgaatatgtgcatga

SEQ ID NO: 86309 - DNA, 20 bp, Homo sapiens
acatctgattctagaactca

SEQ ID NO: 86310 - DNA, 19 bp, Homo sapiens
tcaattcaaaccatccagc

SEQ ID NO: 86311 - DNA, 17 bp, Homo sapiens
ttccccccaagtgacta

SEQ ID NO: 86312 - DNA, 16 bp, Homo sapiens
cagctctgttagcccc

SEQ ID NO: 86313 - DNA, 19 bp, Homo sapiens
tgtttaatacctgtttacc

SEQ ID NO: 86314 - DNA, 17 bp, Homo sapiens
tggcttccacaagtgag

SEQ ID NO: 86315 - DNA, 24 bp, Homo sapiens
tttgcctttatagatgactgtagg

SEQ ID NO: 86316 - DNA, 17 bp, Homo sapiens
gcaacagtccttcacta

SEQ ID NO: 86317 - DNA, 24 bp, Homo sapiens
ttgcccatctttatagttgtgcat

SEQ ID NO: 86318 - DNA, 16 bp, Homo sapiens
agtagctggctgacca

SEQ ID NO: 86319 - DNA, 22 bp, Homo sapiens
tgacatctatgaatgtaccatg

SEQ ID NO: 86320 - DNA, 19 bp, Homo sapiens
ctgcctacttttttctcaa

SEQ ID NO: 86321 - DNA, 22 bp, Homo sapiens
agtatactggggggcagccata

SEQ ID NO: 86322 - DNA, 17 bp, Homo sapiens
tggtagtgctgtctaaa

SEQ ID NO: 86323 - DNA, 22 bp, Homo sapiens
caggacagcagcagaatggatt

SEQ ID NO: 86324 - DNA, 16 bp, Homo sapiens
ggccgttttggtggtg

SEQ ID NO: 86325 - DNA, 27 bp, Homo sapiens
actttaaaaaatcttttaaatagttga

SEQ ID NO: 86326 - DNA, 18 bp, Homo sapiens
acaacaaaaacaagagct

SEQ ID NO: 86327 - DNA, 19 bp, Homo sapiens
gtgggccttaatttttaga

SEQ ID NO: 86328 - DNA, 22 bp, Homo sapiens
aaaacatttttaaaaaacagaa

SEQ ID NO: 86329 - DNA, 20 bp, Homo sapiens
acacctaatttgcctcacca

SEQ ID NO: 86330 - DNA, 21 bp, Homo sapiens
aaaaatactgaaaagcactat

SEQ ID NO: 86331 - DNA, 16 bp, Homo sapiens
tcccggacattactgt

SEQ ID NO: 86332 - DNA, 23 bp, Homo sapiens
ttgcttattgtaaacttttaagt

SEQ ID NO: 86333 - DNA, 21 bp, Homo sapiens
tgaaatacacttaccaggatg

SEQ ID NO: 86334 - DNA, 25 bp, Homo sapiens
aatagttatatttaagtaagattta

SEQ ID NO: 86335 - DNA, 16 bp, Homo sapiens
aagcctgtgtttgtgc

SEQ ID NO: 86336 - DNA, 24 bp, Homo sapiens
taaaaatggaatttttgttgtctt

SEQ ID NO: 86337 - DNA, 21 bp, Homo sapiens
gttgattaactcatgtcatga

SEQ ID NO: 86338 - DNA, 19 bp, Homo sapiens
cagcctcccatttccaatc

SEQ ID NO: 86339 - DNA, 19 bp, Homo sapiens
tcctaccttttaatgcatt

SEQ ID NO: 86340 - DNA, 20 bp, Homo sapiens
acctgaacatccatttcaaa

SEQ ID NO: 86341 - DNA, 22 bp, Homo sapiens
tcccctccctttaccctttctt

SEQ ID NO: 86342 - DNA, 18 bp, Homo sapiens
cacgtatccatcaacagt

SEQ ID NO: 86343 - DNA, 21 bp, Homo sapiens
agccttatatctttctcatgg

SEQ ID NO: 86344 - DNA, 18 bp, Homo sapiens
ggcttctgtcctgtggac

SEQ ID NO: 86345 - DNA, 17 bp, Homo sapiens
ggtgttccattgcttac

SEQ ID NO: 86346 - DNA, 21 bp, Homo sapiens
tgctcaattttttaaagtaac

SEQ ID NO: 86347 - DNA, 18 bp, Homo sapiens
ctgccctattgttactgt

SEQ ID NO: 86348 - DNA, 28 bp, Homo sapiens
tatttatatttaagaacacatataatgt

SEQ ID NO: 86349 - DNA, 19 bp, Homo sapiens
tttgggtcaactctccaat

SEQ ID NO: 86350 - DNA, 20 bp, Homo sapiens
acaattaagatggagtgctt

SEQ ID NO: 86351 - DNA, 22 bp, Homo sapiens
atgaacaggaaaagaaaaaagg

SEQ ID NO: 86352 - DNA, 19 bp, Homo sapiens
ccaaacatcaccttcacct

SEQ ID NO: 86353 - DNA, 24 bp, Homo sapiens
gtgatctttatttttaatttttca

SEQ ID NO: 86354 - DNA, 19 bp, Homo sapiens
tctctgtctaagtagtaac

SEQ ID NO: 86355 - DNA, 25 bp, Homo sapiens
ttaatttaaaatacttatcaagata

SEQ ID NO: 86356 - DNA, 23 bp, Homo sapiens
aactaacctttatatatgcactt

SEQ ID NO: 86357 - DNA, 16 bp, Homo sapiens
tgtgcagttggaatgt

SEQ ID NO: 86358 - DNA, 24 bp, Homo sapiens
cagatttcaattcttttgacaaca

SEQ ID NO: 86359 - DNA, 20 bp, Homo sapiens
gaccacgcggtctttgtaca

SEQ ID NO: 86360 - DNA, 23 bp, Homo sapiens
ttatacttaaacacaatttctta

SEQ ID NO: 86361 - DNA, 22 bp, Homo sapiens
gatgctgttcataagatctacc

SEQ ID NO: 86362 - DNA, 16 bp, Homo sapiens
gctgctgcatctgtcg

SEQ ID NO: 86363 - DNA, 24 bp, Homo sapiens
ttaattaattcttttcatgtgaga

SEQ ID NO: 86364 - DNA, 16 bp, Homo sapiens
gggatgtttcctgcca

SEQ ID NO: 86365 - DNA, 25 bp, Homo sapiens
tttaatgtatggaatttttctttat

SEQ ID NO: 86366 - DNA, 22 bp, Homo sapiens
gaatgaaaagcatacttactga

SEQ ID NO: 86367 - DNA, 17 bp, Homo sapiens
tgatttgcgtcagtgtc

SEQ ID NO: 86368 - DNA, 20 bp, Homo sapiens
aaagaaactaatcaactgag

SEQ ID NO: 86369 - DNA, 16 bp, Homo sapiens
gctgcccaggcagcag

SEQ ID NO: 86370 - DNA, 24 bp, Homo sapiens
aacagattttaccaattcaaaaat

SEQ ID NO: 86371 - DNA, 24 bp, Homo sapiens
gtgcagcttgttgataaagtttag

SEQ ID NO: 86372 - DNA, 16 bp, Homo sapiens
cgacgaaggtcatcaa

SEQ ID NO: 86373 - DNA, 19 bp, Homo sapiens
atgctgaggagaatgaaat

SEQ ID NO: 86374 - DNA, 16 bp, Homo sapiens
gctctgtcttgggtaa

SEQ ID NO: 86375 - DNA, 19 bp, Homo sapiens
atgggaagagatcaccctg

SEQ ID NO: 86376 - DNA, 16 bp, Homo sapiens
tcgtctaggagctgga

SEQ ID NO: 86377 - DNA, 23 bp, Homo sapiens
ctgctgctggaattggtgttgat

SEQ ID NO: 86378 - DNA, 17 bp, Homo sapiens
acggtaaaagacctcag

SEQ ID NO: 86379 - DNA, 22 bp, Homo sapiens
tttgtgaaaggctggggaccgg

SEQ ID NO: 86380 - DNA, 22 bp, Homo sapiens
tcttcagattataaacaggatt

SEQ ID NO: 86381 - DNA, 16 bp, Homo sapiens
ttacaccgggccctcc

SEQ ID NO: 86382 - DNA, 18 bp, Homo sapiens
gcagcaaacacattttca

SEQ ID NO: 86383 - DNA, 23 bp, Homo sapiens
gattgcagacccacaacctttag

SEQ ID NO: 86384 - DNA, 22 bp, Homo sapiens
gttggaagaagggtttttccct

SEQ ID NO: 86385 - DNA, 16 bp, Homo sapiens
ccaccgacatcagctc

SEQ ID NO: 86386 - DNA, 22 bp, Homo sapiens
tttgtaaaattttggagaaggg

SEQ ID NO: 86387 - DNA, 24 bp, Homo sapiens
gcccgcttgcggcgcggctggtag

SEQ ID NO: 86388 - DNA, 22 bp, Homo sapiens
ctcagggctggcggcgggactc

SEQ ID NO: 86389 - DNA, 24 bp, Homo sapiens
caccttgccgtaagagccttcccc

SEQ ID NO: 86390 - DNA, 24 bp, Homo sapiens
cagcagctgggcatgttcacggag

SEQ ID NO: 86391 - DNA, 18 bp, Homo sapiens
cttcttgaggatcttgac

SEQ ID NO: 86392 - DNA, 22 bp, Homo sapiens
catcgactccaccgaggtcatc

SEQ ID NO: 86393 - DNA, 23 bp, Homo sapiens
cagcaagccatacttacttcttc

SEQ ID NO: 86394 - DNA, 23 bp, Homo sapiens
caagtacctgatgggggacctgc

SEQ ID NO: 86395 - DNA, 17 bp, Homo sapiens
gaaggaaggaagacaga

SEQ ID NO: 86396 - DNA, 16 bp, Homo sapiens
gagacgctgtgcagga

SEQ ID NO: 86397 - DNA, 18 bp, Homo sapiens
caggcgccagacgggtcc

SEQ ID NO: 86398 - DNA, 24 bp, Homo sapiens
cccaacggggaggccaacgtgaag

SEQ ID NO: 86399 - DNA, 16 bp, Homo sapiens
cccctgcagggccctt

SEQ ID NO: 86400 - DNA, 19 bp, Homo sapiens
cagctggatgacatttttg

SEQ ID NO: 86401 - DNA, 16 bp, Homo sapiens
gaggtacgccacttcc

SEQ ID NO: 86402 - DNA, 17 bp, Homo sapiens
gtcccaacaccggaaag

SEQ ID NO: 86403 - DNA, 24 bp, Homo sapiens
caggccatcatcctgacgttgggt

SEQ ID NO: 86404 - DNA, 21 bp, Homo sapiens
aagaggagcaggcctcgaggc

SEQ ID NO: 86405 - DNA, 23 bp, Homo sapiens
aactactgaggaggttacggcac

SEQ ID NO: 86406 - DNA, 19 bp, Homo sapiens
acttccggggaaccaggga

SEQ ID NO: 86407 - DNA, 21 bp, Homo sapiens
gccttttcagaggggtggctg

SEQ ID NO: 86408 - DNA, 24 bp, Homo sapiens
aaacgcttctccggcacgctgtcc

SEQ ID NO: 86409 - DNA, 17 bp, Homo sapiens
ggtgcagagggtccctc

SEQ ID NO: 86410 - DNA, 19 bp, Homo sapiens
caccctggcccctgccccg

SEQ ID NO: 86411 - DNA, 24 bp, Homo sapiens
gtggggccgccccctgagctgtgt

SEQ ID NO: 86412 - DNA, 19 bp, Homo sapiens
ggacaagcagtgtggcctc

SEQ ID NO: 86413 - DNA, 21 bp, Homo sapiens
tgcgtgtgtggcatgcaggaa

SEQ ID NO: 86414 - DNA, 20 bp, Homo sapiens
tcgaaaaaaaacacaaaaaa

SEQ ID NO: 86415 - DNA, 16 bp, Homo sapiens
caggtgtggctccctg

SEQ ID NO: 86416 - DNA, 16 bp, Homo sapiens
ctatgcaggtactcca

SEQ ID NO: 86417 - DNA, 20 bp, Homo sapiens
ttctgtgacttcccagctgg

SEQ ID NO: 86418 - DNA, 22 bp, Homo sapiens
ggtgccaccggtggtgagcagc

SEQ ID NO: 86419 - DNA, 16 bp, Homo sapiens
gtgaggggcagggagg

SEQ ID NO: 86420 - DNA, 24 bp, Homo sapiens
ggggcgccccagggccccccctag

SEQ ID NO: 86421 - DNA, 24 bp, Homo sapiens
tacttctgtcagctgattgacggc

SEQ ID NO: 86422 - DNA, 19 bp, Homo sapiens
cgaacgggtgcagtgcctg

SEQ ID NO: 86423 - DNA, 23 bp, Homo sapiens
caaggacatcaagccggggaacc

SEQ ID NO: 86424 - DNA, 21 bp, Homo sapiens
caatctcgggcggctggaaag

SEQ ID NO: 86425 - DNA, 23 bp, Homo sapiens
cctgggcgtggccgaggtaggca

SEQ ID NO: 86426 - DNA, 24 bp, Homo sapiens
cagggtgaccccagccgaccagat

SEQ ID NO: 86427 - DNA, 24 bp, Homo sapiens
ctgagggctgcacggcaccgccac

SEQ ID NO: 86428 - DNA, 23 bp, Homo sapiens
cccaagacgcagaggcccctcgg

SEQ ID NO: 86429 - DNA, 24 bp, Homo sapiens
cctgccggaccagccagggctccc

SEQ ID NO: 86430 - DNA, 22 bp, Homo sapiens
ggccagagagggtctgggccgg

SEQ ID NO: 86431 - DNA, 19 bp, Homo sapiens
cggcttcaaggtggacatc

SEQ ID NO: 86432 - DNA, 20 bp, Homo sapiens
gttgtccccttcgaaggggt

SEQ ID NO: 86433 - DNA, 21 bp, Homo sapiens
gtccacagggcctctggtcca

SEQ ID NO: 86434 - DNA, 23 bp, Homo sapiens
ggggggccacagtcgcccgggat

SEQ ID NO: 86435 - DNA, 16 bp, Homo sapiens
gtcaaccaccttgact

SEQ ID NO: 86436 - DNA, 16 bp, Homo sapiens
gctgcgggcagaggga

SEQ ID NO: 86437 - DNA, 18 bp, Homo sapiens
acaacatcaccacgggtc

SEQ ID NO: 86438 - DNA, 16 bp, Homo sapiens
aatagccccccacctg

SEQ ID NO: 86439 - DNA, 20 bp, Homo sapiens
gaacatcgggaaggggagct

SEQ ID NO: 86440 - DNA, 24 bp, Homo sapiens
gcaaaccaggccctgcggggaggt

SEQ ID NO: 86441 - DNA, 22 bp, Homo sapiens
gatggagaacctcttggccggt

SEQ ID NO: 86442 - DNA, 24 bp, Homo sapiens
cggggtcccccttaggagcgtcca

SEQ ID NO: 86443 - DNA, 21 bp, Homo sapiens
ccctgcagcctcggccccact

SEQ ID NO: 86444 - DNA, 24 bp, Homo sapiens
gacggttggtggggtctcaggcct

SEQ ID NO: 86445 - DNA, 24 bp, Homo sapiens
ctggcacccccaccacgccctgct

SEQ ID NO: 86446 - DNA, 24 bp, Homo sapiens
ctcagggatgcttgagtacgaacc

SEQ ID NO: 86447 - DNA, 21 bp, Homo sapiens
gaccccactcgggccccgaga

SEQ ID NO: 86448 - DNA, 16 bp, Homo sapiens
ctgctcctagaggaca

SEQ ID NO: 86449 - DNA, 19 bp, Homo sapiens
cactggtgcttcagccgga

SEQ ID NO: 86450 - DNA, 23 bp, Homo sapiens
cacggcctggtcccagctcctga

SEQ ID NO: 86451 - DNA, 22 bp, Homo sapiens
ctccaagtacggcaccacagtc

SEQ ID NO: 86452 - DNA, 24 bp, Homo sapiens
aaaactggaccgccctggtgccag

SEQ ID NO: 86453 - DNA, 24 bp, Homo sapiens
gagtgtagatgatgtcatcctcga

SEQ ID NO: 86454 - DNA, 23 bp, Homo sapiens
gctggttccggaagaaacatcct

SEQ ID NO: 86455 - DNA, 18 bp, Homo sapiens
cagcagagccgggcaggg

SEQ ID NO: 86456 - DNA, 24 bp, Homo sapiens
gacaccaaggaccggtggcgcagc

SEQ ID NO: 86457 - DNA, 21 bp, Homo sapiens
cagaagctgtccttgttgcag

SEQ ID NO: 86458 - DNA, 20 bp, Homo sapiens
gacgaggacgaggacctctt

SEQ ID NO: 86459 - DNA, 17 bp, Homo sapiens
gaggcagcctgcaggtg

SEQ ID NO: 86460 - DNA, 21 bp, Homo sapiens
agagctgctggggggcagcat

SEQ ID NO: 86461 - DNA, 22 bp, Homo sapiens
ggccccggcgctgtccattgtg

SEQ ID NO: 86462 - DNA, 22 bp, Homo sapiens
cgggcatggcctgggcagcagc

SEQ ID NO: 86463 - DNA, 24 bp, Homo sapiens
ccgccctggatttggtgctcagct

SEQ ID NO: 86464 - DNA, 24 bp, Homo sapiens
ctgtggctctggggttgcgcccct

SEQ ID NO: 86465 - DNA, 22 bp, Homo sapiens
gcggatcttgctgctggcggag

SEQ ID NO: 86466 - DNA, 24 bp, Homo sapiens
tcccagaagaggaggccagtcaca

SEQ ID NO: 86467 - DNA, 23 bp, Homo sapiens
ccgggccccgccgcgccccacct

SEQ ID NO: 86468 - DNA, 23 bp, Homo sapiens
tgtatgaacggcacagaggcggc

SEQ ID NO: 86469 - DNA, 22 bp, Homo sapiens
gcgggctatgctcacggctggc

SEQ ID NO: 86470 - DNA, 22 bp, Homo sapiens
caaccctgcccgcaaggcctgc

SEQ ID NO: 86471 - DNA, 23 bp, Homo sapiens
cacccaaaggccacatggcaacc

SEQ ID NO: 86472 - DNA, 24 bp, Homo sapiens
gacctggccgaggagttccgccca

SEQ ID NO: 86473 - DNA, 24 bp, Homo sapiens
tgtagattctgatgtgaccgtatg

SEQ ID NO: 86474 - DNA, 16 bp, Homo sapiens
gctagggcccagcatg

SEQ ID NO: 86475 - DNA, 24 bp, Homo sapiens
catgaaccccagactgaccaggac

SEQ ID NO: 86476 - DNA, 23 bp, Homo sapiens
tggggtgtcctgctgagggcggc

SEQ ID NO: 86477 - DNA, 23 bp, Homo sapiens
gtgaagatgtccactccagaccc

SEQ ID NO: 86478 - DNA, 21 bp, Homo sapiens
ttgtgcatctggtgcatgttg

SEQ ID NO: 86479 - DNA, 24 bp, Homo sapiens
ggccctggcccttcccctggagcc

SEQ ID NO: 86480 - DNA, 24 bp, Homo sapiens
cagaggctgcctgcagccctagtg

SEQ ID NO: 86481 - DNA, 23 bp, Homo sapiens
cagcatgatggggcccagcccag

SEQ ID NO: 86482 - DNA, 21 bp, Homo sapiens
gacacctccaacaagaaggct

SEQ ID NO: 86483 - DNA, 24 bp, Homo sapiens
ccaggggcctggagggtaccctca

SEQ ID NO: 86484 - DNA, 22 bp, Homo sapiens
aggtgtcagaaccttgccttgg

SEQ ID NO: 86485 - DNA, 23 bp, Homo sapiens
ctggttgtagcgcgggtcgtccg

SEQ ID NO: 86486 - DNA, 24 bp, Homo sapiens
atcttcgggtggctgttctcggtg

SEQ ID NO: 86487 - DNA, 24 bp, Homo sapiens
atggggctgggcgggggccccatc

SEQ ID NO: 86488 - DNA, 18 bp, Homo sapiens
ctcacgttccacatgctg

SEQ ID NO: 86489 - DNA, 23 bp, Homo sapiens
agtatgacaaacacaaggcagga

SEQ ID NO: 86490 - DNA, 20 bp, Homo sapiens
catgagaagggcatgtcgga

SEQ ID NO: 86491 - DNA, 16 bp, Homo sapiens
gtactccctgaatcca

SEQ ID NO: 86492 - DNA, 24 bp, Homo sapiens
gcggtcagggggccatgctgggat

SEQ ID NO: 86493 - DNA, 24 bp, Homo sapiens
gagcaccagccacgccatgccaga

SEQ ID NO: 86494 - DNA, 24 bp, Homo sapiens
gtgccttcagcatgtgccctccag

SEQ ID NO: 86495 - DNA, 16 bp, Homo sapiens
cactggctggaactgg

SEQ ID NO: 86496 - DNA, 16 bp, Homo sapiens
cctgtctcagagtagg

SEQ ID NO: 86497 - DNA, 16 bp, Homo sapiens
gtcagcaccatccagc

SEQ ID NO: 86498 - DNA, 24 bp, Homo sapiens
catatgctgccgagtgaccagtgg

SEQ ID NO: 86499 - DNA, 21 bp, Homo sapiens
ggtgcagctggttctggttaa

SEQ ID NO: 86500 - DNA, 21 bp, Homo sapiens
gggtggctctgagcatgcctc

SEQ ID NO: 86501 - DNA, 24 bp, Homo sapiens
caggtggtcggggaggggctgccc

SEQ ID NO: 86502 - DNA, 24 bp, Homo sapiens
atgtcttccgggccaggaggtgcc

SEQ ID NO: 86503 - DNA, 24 bp, Homo sapiens
gttggcatctgctgctgcatcccg

SEQ ID NO: 86504 - DNA, 24 bp, Homo sapiens
cagaaccggggcccaaccccattt

SEQ ID NO: 86505 - DNA, 24 bp, Homo sapiens
cgggccggggccagggccagggcc

SEQ ID NO: 86506 - DNA, 21 bp, Homo sapiens
ctacaagatgctggccagggg

SEQ ID NO: 86507 - DNA, 18 bp, Homo sapiens
ggcagccagtcttaccat

SEQ ID NO: 86508 - DNA, 22 bp, Homo sapiens
gggcaagcggccgatgcccggg

SEQ ID NO: 86509 - DNA, 24 bp, Homo sapiens
cagagcacggtctgtccaccccgc

SEQ ID NO: 86510 - DNA, 24 bp, Homo sapiens
gtccgcaacaggacccggccctgg

SEQ ID NO: 86511 - DNA, 18 bp, Homo sapiens
agaagtgcagtatgggcc

SEQ ID NO: 86512 - DNA, 23 bp, Homo sapiens
cctccaaattacagcaggcctca

SEQ ID NO: 86513 - DNA, 21 bp, Homo sapiens
gggcagctaaatgctgcttcc

SEQ ID NO: 86514 - DNA, 23 bp, Homo sapiens
ctggcctggcatcccggggggca

SEQ ID NO: 86515 - DNA, 24 bp, Homo sapiens
tatctgctgtgtcccctggagcca

SEQ ID NO: 86516 - DNA, 20 bp, Homo sapiens
caccaccatagaagagggag

SEQ ID NO: 86517 - DNA, 20 bp, Homo sapiens
gcactgttttctcttttgtt

SEQ ID NO: 86518 - DNA, 17 bp, Homo sapiens
tgacaaagctcatctca

SEQ ID NO: 86519 - DNA, 18 bp, Homo sapiens
caggaccctcgggcgtgc

SEQ ID NO: 86520 - DNA, 18 bp, Homo sapiens
gaccaccacaagaaaagt

SEQ ID NO: 86521 - DNA, 24 bp, Homo sapiens
gagcccaaggcaggtgtgaaggac

SEQ ID NO: 86522 - DNA, 16 bp, Homo sapiens
ttggctgcgggggaat

SEQ ID NO: 86523 - DNA, 24 bp, Homo sapiens
cctgtccccagtgcctcaagcagc

SEQ ID NO: 86524 - DNA, 16 bp, Homo sapiens
tggcatcacgggcgag

SEQ ID NO: 86525 - DNA, 24 bp, Homo sapiens
gagctcaacatgacgccctggccc

SEQ ID NO: 86526 - DNA, 16 bp, Homo sapiens
tggtgcagtggcacca

SEQ ID NO: 86527 - DNA, 21 bp, Homo sapiens
cccacgagcacccctcagaag

SEQ ID NO: 86528 - DNA, 24 bp, Homo sapiens
gctcctgcaggatctccacagggt

SEQ ID NO: 86529 - DNA, 21 bp, Homo sapiens
ccccctgccgtcccacccgcc

SEQ ID NO: 86530 - DNA, 23 bp, Homo sapiens
gacatgggggacacagggcagtg

SEQ ID NO: 86531 - DNA, 22 bp, Homo sapiens
cagccggcccagcccgcgccca

SEQ ID NO: 86532 - DNA, 19 bp, Homo sapiens
gtgggcacagggcactgtt

SEQ ID NO: 86533 - DNA, 21 bp, Homo sapiens
aagccgcggggcctcgaccct

SEQ ID NO: 86534 - DNA, 22 bp, Homo sapiens
aaacagaccgcagccagggtgg

SEQ ID NO: 86535 - DNA, 21 bp, Homo sapiens
gggaaggttttcaagttcctg

SEQ ID NO: 86536 - DNA, 23 bp, Homo sapiens
cttgcctcatgactagtgcctgc

SEQ ID NO: 86537 - DNA, 17 bp, Homo sapiens
gagggccttgagctcaa

SEQ ID NO: 86538 - DNA, 21 bp, Homo sapiens
ctgtaactgggtgccctggca

SEQ ID NO: 86539 - DNA, 18 bp, Homo sapiens
ggcccttttcggaaagct

SEQ ID NO: 86540 - DNA, 18 bp, Homo sapiens
gctcgcatcgcacaccga

SEQ ID NO: 86541 - DNA, 17 bp, Homo sapiens
gtaatactagccaggca

SEQ ID NO: 86542 - DNA, 23 bp, Homo sapiens
gggatttgcgaaccaaagcgacc

SEQ ID NO: 86543 - DNA, 23 bp, Homo sapiens
agaggaaggctctgcagtgattg

SEQ ID NO: 86544 - DNA, 24 bp, Homo sapiens
gggggcacctgctagacgtcccct

SEQ ID NO: 86545 - DNA, 16 bp, Homo sapiens
cttagcattgagggct

SEQ ID NO: 86546 - DNA, 24 bp, Homo sapiens
cctttagcggtgaagcatgtgaca

SEQ ID NO: 86547 - DNA, 16 bp, Homo sapiens
agcttctcagtgatgc

SEQ ID NO: 86548 - DNA, 23 bp, Homo sapiens
ctgtgcagtgcgcgggcttgtcc

SEQ ID NO: 86549 - DNA, 16 bp, Homo sapiens
gagcgtacctggtgct

SEQ ID NO: 86550 - DNA, 24 bp, Homo sapiens
gtgcatgcggagggacacagcgct

SEQ ID NO: 86551 - DNA, 16 bp, Homo sapiens
gtggcaaccgctggac

SEQ ID NO: 86552 - DNA, 22 bp, Homo sapiens
cgccagtccctgcgcgaggccc

SEQ ID NO: 86553 - DNA, 20 bp, Homo sapiens
ttacaatgagcaaaagagag

SEQ ID NO: 86554 - DNA, 17 bp, Homo sapiens
cgcaagcgccggcagaa

SEQ ID NO: 86555 - DNA, 20 bp, Homo sapiens
tattccttgaaatccttggc

SEQ ID NO: 86556 - DNA, 22 bp, Homo sapiens
cctcccaaagcgctgggattac

SEQ ID NO: 86557 - DNA, 16 bp, Homo sapiens
atggtacgtggccact

SEQ ID NO: 86558 - DNA, 22 bp, Homo sapiens
gatgtgtccaccatgctgctga

SEQ ID NO: 86559 - DNA, 16 bp, Homo sapiens
gcatgcgctccttctc

SEQ ID NO: 86560 - DNA, 21 bp, Homo sapiens
caatagcattctccagcatgc

SEQ ID NO: 86561 - DNA, 16 bp, Homo sapiens
cagtaccagctacaca

SEQ ID NO: 86562 - DNA, 24 bp, Homo sapiens
ggcaaaatccagaagctgaccaag

SEQ ID NO: 86563 - DNA, 24 bp, Homo sapiens
ctgtcccacctctaactccgagct

SEQ ID NO: 86564 - DNA, 23 bp, Homo sapiens
agaagaaagagaacgagcggatc

SEQ ID NO: 86565 - DNA, 24 bp, Homo sapiens
tgattcctgaatgaggagtcgatt

SEQ ID NO: 86566 - DNA, 23 bp, Homo sapiens
gaggtaggccaggcgcttgtcct

SEQ ID NO: 86567 - DNA, 16 bp, Homo sapiens
ccctcagtgcgcttct

SEQ ID NO: 86568 - DNA, 20 bp, Homo sapiens
agccttgtgctgccgcacca

SEQ ID NO: 86569 - DNA, 17 bp, Homo sapiens
ccaccacattgcagtaa

SEQ ID NO: 86570 - DNA, 16 bp, Homo sapiens
aggcccagcacacctt

SEQ ID NO: 86571 - DNA, 24 bp, Homo sapiens
agctcatcgaccagaagaaggaca

SEQ ID NO: 86572 - DNA, 20 bp, Homo sapiens
aaggctgaggccacacacgt

SEQ ID NO: 86573 - DNA, 18 bp, Homo sapiens
cgtggctaacctcacgga

SEQ ID NO: 86574 - DNA, 20 bp, Homo sapiens
gtctgtccttctgcattttc

SEQ ID NO: 86575 - DNA, 24 bp, Homo sapiens
gaaaaagaagaaaaagaaaaagaa

SEQ ID NO: 86576 - DNA, 24 bp, Homo sapiens
tagcttgatacttccacaagaaac

SEQ ID NO: 86577 - DNA, 19 bp, Homo sapiens
gagcagccgtcttcacgtg

SEQ ID NO: 86578 - DNA, 22 bp, Homo sapiens
ttgttcgtaattttaaaagaac

SEQ ID NO: 86579 - DNA, 20 bp, Homo sapiens
tctctctatttccagaaggc

SEQ ID NO: 86580 - DNA, 16 bp, Homo sapiens
ggatgggcgtcagagg

SEQ ID NO: 86581 - DNA, 16 bp, Homo sapiens
cgggaggtcgctcatc

SEQ ID NO: 86582 - DNA, 20 bp, Homo sapiens
atgtttgcctgccattttct

SEQ ID NO: 86583 - DNA, 16 bp, Homo sapiens
tttgggggcatctgtg

SEQ ID NO: 86584 - DNA, 16 bp, Homo sapiens
gtttggtctggaggcc

SEQ ID NO: 86585 - DNA, 17 bp, Homo sapiens
tgcatctggaatgcaag

SEQ ID NO: 86586 - DNA, 24 bp, Homo sapiens
ttttcagcctctggacgagaccag

SEQ ID NO: 86587 - DNA, 22 bp, Homo sapiens
agaagtaaaattgctcctggct

SEQ ID NO: 86588 - DNA, 22 bp, Homo sapiens
gtgggaagatcctcacaggcac

SEQ ID NO: 86589 - DNA, 24 bp, Homo sapiens
aaatctgctcagagccagcagaat

SEQ ID NO: 86590 - DNA, 18 bp, Homo sapiens
atcagacctcggagctac

SEQ ID NO: 86591 - DNA, 19 bp, Homo sapiens
gtgggccttgttccaggga

SEQ ID NO: 86592 - DNA, 16 bp, Homo sapiens
gaaagccaggaaatgc

SEQ ID NO: 86593 - DNA, 23 bp, Homo sapiens
ggcaggtttggtagggaaagtga

SEQ ID NO: 86594 - DNA, 19 bp, Homo sapiens
cagggcaggagacggtcac

SEQ ID NO: 86595 - DNA, 24 bp, Homo sapiens
cttacattttttctaggtatgaag

SEQ ID NO: 86596 - DNA, 16 bp, Homo sapiens
ctaaagcaccgacttc

SEQ ID NO: 86597 - DNA, 26 bp, Homo sapiens
aatacataattttaaaacaaagatgt

SEQ ID NO: 86598 - DNA, 17 bp, Homo sapiens
gtgggaggctgtgctgc

SEQ ID NO: 86599 - DNA, 16 bp, Homo sapiens
gagggctgtaagaaga

SEQ ID NO: 86600 - DNA, 16 bp, Homo sapiens
cctcagagacgtcatc

SEQ ID NO: 86601 - DNA, 23 bp, Homo sapiens
gtcccgtcccccctctctggggg

SEQ ID NO: 86602 - DNA, 16 bp, Homo sapiens
gaagctggcacagaac

SEQ ID NO: 86603 - DNA, 22 bp, Homo sapiens
gaggaggaagagcagccgcagg

SEQ ID NO: 86604 - DNA, 23 bp, Homo sapiens
ctggacagtgctgaatgtcagct

SEQ ID NO: 86605 - DNA, 19 bp, Homo sapiens
ttccagatccagacagcga

SEQ ID NO: 86606 - DNA, 23 bp, Homo sapiens
aaaatacatgaaatgtgaagtaa

SEQ ID NO: 86607 - DNA, 19 bp, Homo sapiens
gcctcacactgtccggctg

SEQ ID NO: 86608 - DNA, 24 bp, Homo sapiens
tagtaggactgcaggccacgtgca

SEQ ID NO: 86609 - DNA, 24 bp, Homo sapiens
agaaagggccactccgcagagctt

SEQ ID NO: 86610 - DNA, 17 bp, Homo sapiens
accataagcgctgactg

SEQ ID NO: 86611 - DNA, 19 bp, Homo sapiens
gtgtccttacccggcacct

SEQ ID NO: 86612 - DNA, 22 bp, Homo sapiens
gcagctacgtggcggtggcctc

SEQ ID NO: 86613 - DNA, 24 bp, Homo sapiens
gatgatgaatatggcgtgtcccag

SEQ ID NO: 86614 - DNA, 21 bp, Homo sapiens
aactcaggtctgcctgaggtc

SEQ ID NO: 86615 - DNA, 19 bp, Homo sapiens
gctgtcactgagagagtgg

SEQ ID NO: 86616 - DNA, 22 bp, Homo sapiens
acacatggggaaaccgaggctc

SEQ ID NO: 86617 - DNA, 21 bp, Homo sapiens
caggttgttgttgtacaggga

SEQ ID NO: 86618 - DNA, 24 bp, Homo sapiens
gtgggatgtggcttaggcagaact

SEQ ID NO: 86619 - DNA, 21 bp, Homo sapiens
tgatgagcgcgatggtctgga

SEQ ID NO: 86620 - DNA, 22 bp, Homo sapiens
ccctctggtgtccgacccggcc

SEQ ID NO: 86621 - DNA, 24 bp, Homo sapiens
acgagagaggcacgatgatgagga

SEQ ID NO: 86622 - DNA, 19 bp, Homo sapiens
tcaaaggtttggagtggct

SEQ ID NO: 86623 - DNA, 21 bp, Homo sapiens
aacaaacacaggagcgtgtga

SEQ ID NO: 86624 - DNA, 22 bp, Homo sapiens
gacgagatgggcctggggaaga

SEQ ID NO: 86625 - DNA, 22 bp, Homo sapiens
aggaaaacaaatttctgtaatt

SEQ ID NO: 86626 - DNA, 21 bp, Homo sapiens
caaacgcatcaatgggccctt

SEQ ID NO: 86627 - DNA, 23 bp, Homo sapiens
ctccctccctccctcagctgccc

SEQ ID NO: 86628 - DNA, 19 bp, Homo sapiens
aagacaccttcaccacgga

SEQ ID NO: 86629 - DNA, 24 bp, Homo sapiens
gtggccatgttggcctcgcccctg

SEQ ID NO: 86630 - DNA, 20 bp, Homo sapiens
ccaccaccgcctgcacctcc

SEQ ID NO: 86631 - DNA, 17 bp, Homo sapiens
ggcacttgactctcatt

SEQ ID NO: 86632 - DNA, 18 bp, Homo sapiens
tggagacccagcattctc

SEQ ID NO: 86633 - DNA, 23 bp, Homo sapiens
gtacgagtttgacaagtgggccc

SEQ ID NO: 86634 - DNA, 16 bp, Homo sapiens
agtccaaactcccgga

SEQ ID NO: 86635 - DNA, 21 bp, Homo sapiens
ggacgcgccagcggccctgcc

SEQ ID NO: 86636 - DNA, 16 bp, Homo sapiens
cgttgaacttcccact

SEQ ID NO: 86637 - DNA, 19 bp, Homo sapiens
cgtgtcactgggcagttgc

SEQ ID NO: 86638 - DNA, 24 bp, Homo sapiens
cagggacacgttaccttggcgagg

SEQ ID NO: 86639 - DNA, 23 bp, Homo sapiens
acccggctccaaaagccgagctg

SEQ ID NO: 86640 - DNA, 23 bp, Homo sapiens
gaggagacgggcagcgtgaccca

SEQ ID NO: 86641 - DNA, 23 bp, Homo sapiens
gacgggcctttgtcccccagctc

SEQ ID NO: 86642 - DNA, 16 bp, Homo sapiens
ctgtcttcacgcacat

SEQ ID NO: 86643 - DNA, 22 bp, Homo sapiens
tacatcatcaaagacaagcaca

SEQ ID NO: 86644 - DNA, 17 bp, Homo sapiens
ctccaactcggtgagtc

SEQ ID NO: 86645 - DNA, 24 bp, Homo sapiens
tggttcttcatgcggtgaccttcg

SEQ ID NO: 86646 - DNA, 23 bp, Homo sapiens
cccagctgcgctcttccacctgg

SEQ ID NO: 86647 - DNA, 24 bp, Homo sapiens
cagcaggcggcggggtgccacata

SEQ ID NO: 86648 - DNA, 20 bp, Homo sapiens
atgtgccgggccacctgctg

SEQ ID NO: 86649 - DNA, 23 bp, Homo sapiens
aagttgagcagcgcccagagctc

SEQ ID NO: 86650 - DNA, 17 bp, Homo sapiens
gaagtacatgattgtgg

SEQ ID NO: 86651 - DNA, 22 bp, Homo sapiens
gcaaagggtgcgttaaaccact

SEQ ID NO: 86652 - DNA, 24 bp, Homo sapiens
tgacgcaggtgctcaacacgcact

SEQ ID NO: 86653 - DNA, 24 bp, Homo sapiens
cagccgcacctggaaccgtcagca

SEQ ID NO: 86654 - DNA, 16 bp, Homo sapiens
tgcagaacaagcttcc

SEQ ID NO: 86655 - DNA, 20 bp, Homo sapiens
cacaggcccagccagctgta

SEQ ID NO: 86656 - DNA, 21 bp, Homo sapiens
gagctgcagcaccttcgagca

SEQ ID NO: 86657 - DNA, 16 bp, Homo sapiens
cttgggttccagggct

SEQ ID NO: 86658 - DNA, 16 bp, Homo sapiens
tggctcccagaaagca

SEQ ID NO: 86659 - DNA, 24 bp, Homo sapiens
ctttgtggagacgccggatgatga

SEQ ID NO: 86660 - DNA, 16 bp, Homo sapiens
ggggaccccgtccacc

SEQ ID NO: 86661 - DNA, 23 bp, Homo sapiens
accttttcgggcaactgggcctc

SEQ ID NO: 86662 - DNA, 17 bp, Homo sapiens
ctcctttggaggtaacg

SEQ ID NO: 86663 - DNA, 19 bp, Homo sapiens
aagcccccacgtgaggctg

SEQ ID NO: 86664 - DNA, 21 bp, Homo sapiens
tgaatgaggaggaaaccattc

SEQ ID NO: 86665 - DNA, 24 bp, Homo sapiens
ccaagctggattgaccagggcagg

SEQ ID NO: 86666 - DNA, 16 bp, Homo sapiens
cgactcaagaaggaag

SEQ ID NO: 86667 - DNA, 19 bp, Homo sapiens
ggtctcccctcttctcccc

SEQ ID NO: 86668 - DNA, 23 bp, Homo sapiens
cggtagagcactcgctgcagcgc

SEQ ID NO: 86669 - DNA, 20 bp, Homo sapiens
gtcagagctcatatgacagg

SEQ ID NO: 86670 - DNA, 16 bp, Homo sapiens
ttcttgtccttctcgg

SEQ ID NO: 86671 - DNA, 24 bp, Homo sapiens
gagtcaggcctcaagccaccttgg

SEQ ID NO: 86672 - DNA, 19 bp, Homo sapiens
ctgccacgctgccggcctt

SEQ ID NO: 86673 - DNA, 22 bp, Homo sapiens
gtcatcaagtgcgacatgtctg

SEQ ID NO: 86674 - DNA, 19 bp, Homo sapiens
agatgccctggggatcatg

SEQ ID NO: 86675 - DNA, 18 bp, Homo sapiens
gtgctgctgactgatggc

SEQ ID NO: 86676 - DNA, 17 bp, Homo sapiens
catctcctcactcccaa

SEQ ID NO: 86677 - DNA, 21 bp, Homo sapiens
ggggtggttgcagatcttccg

SEQ ID NO: 86678 - DNA, 16 bp, Homo sapiens
tggcccttctcccaac

SEQ ID NO: 86679 - DNA, 23 bp, Homo sapiens
gacagcagggcctgagccgtccc

SEQ ID NO: 86680 - DNA, 20 bp, Homo sapiens
caagaccccatttgggtccc

SEQ ID NO: 86681 - DNA, 23 bp, Homo sapiens
aaaatattcgagtctgtttttaa

SEQ ID NO: 86682 - DNA, 19 bp, Homo sapiens
aacaccatcatgcagctgc

SEQ ID NO: 86683 - DNA, 17 bp, Homo sapiens
gtgaagcgaagaccaaa

SEQ ID NO: 86684 - DNA, 18 bp, Homo sapiens
atgccgccagtgaacccc

SEQ ID NO: 86685 - DNA, 18 bp, Homo sapiens
gtgccgagcacacagtgt

SEQ ID NO: 86686 - DNA, 16 bp, Homo sapiens
gaaaacctctgggtgg

SEQ ID NO: 86687 - DNA, 19 bp, Homo sapiens
ggggcccggtggcctgctc

SEQ ID NO: 86688 - DNA, 20 bp, Homo sapiens
ttttctgcctttgaaattgg

SEQ ID NO: 86689 - DNA, 16 bp, Homo sapiens
ttccgagcacttgggg

SEQ ID NO: 86690 - DNA, 21 bp, Homo sapiens
tgctgaagctttgggtgggtg

SEQ ID NO: 86691 - DNA, 22 bp, Homo sapiens
agtttgggaagaattctatcaa

SEQ ID NO: 86692 - DNA, 19 bp, Homo sapiens
ctggcctggaggcgggcga

SEQ ID NO: 86693 - DNA, 17 bp, Homo sapiens
atgatggtcatgaggga

SEQ ID NO: 86694 - DNA, 16 bp, Homo sapiens
atcctgcgccttctct

SEQ ID NO: 86695 - DNA, 22 bp, Homo sapiens
cactggctcatactcaccatca

SEQ ID NO: 86696 - DNA, 18 bp, Homo sapiens
cgggtaaatttgagcttc

SEQ ID NO: 86697 - DNA, 16 bp, Homo sapiens
gtgaggagcttctgtg

SEQ ID NO: 86698 - DNA, 24 bp, Homo sapiens
acaaagtgctgctgttctgccaaa

SEQ ID NO: 86699 - DNA, 18 bp, Homo sapiens
gcccactctggccactgg

SEQ ID NO: 86700 - DNA, 23 bp, Homo sapiens
gcggctttaaatacctcaggctt

SEQ ID NO: 86701 - DNA, 16 bp, Homo sapiens
cacaggcccgtgtgga

SEQ ID NO: 86702 - DNA, 23 bp, Homo sapiens
tgaagtactcagagccgggctcg

SEQ ID NO: 86703 - DNA, 24 bp, Homo sapiens
gatcctgctcctgctctcagaagc

SEQ ID NO: 86704 - DNA, 21 bp, Homo sapiens
gtgtctgccgactggaggttc

SEQ ID NO: 86705 - DNA, 19 bp, Homo sapiens
tgaccctgttctcctctgt

SEQ ID NO: 86706 - DNA, 16 bp, Homo sapiens
gcccggcccgctttta

SEQ ID NO: 86707 - DNA, 24 bp, Homo sapiens
ggggcatgctgctgaaaaccttca

SEQ ID NO: 86708 - DNA, 19 bp, Homo sapiens
ggaccctcaagccagggcc

SEQ ID NO: 86709 - DNA, 21 bp, Homo sapiens
ctggggggctcggcctgaacc

SEQ ID NO: 86710 - DNA, 16 bp, Homo sapiens
gatatgggtgcagctc

SEQ ID NO: 86711 - DNA, 22 bp, Homo sapiens
ctgcccgatgcggtgggctcgg

SEQ ID NO: 86712 - DNA, 24 bp, Homo sapiens
ggcagaattgtcaggccgagggtg

SEQ ID NO: 86713 - DNA, 21 bp, Homo sapiens
gcagctaggatcttctcctcc

SEQ ID NO: 86714 - DNA, 20 bp, Homo sapiens
ggccaccttcccttttatga

SEQ ID NO: 86715 - DNA, 17 bp, Homo sapiens
gaacatgccggcctgga

SEQ ID NO: 86716 - DNA, 16 bp, Homo sapiens
aagcgcaggaccgagc

SEQ ID NO: 86717 - DNA, 24 bp, Homo sapiens
catcctgctcctcgtgctccagga

SEQ ID NO: 86718 - DNA, 23 bp, Homo sapiens
gtgctccgcctctgcaccgtcaa

SEQ ID NO: 86719 - DNA, 17 bp, Homo sapiens
acgcgtccaccattcac

SEQ ID NO: 86720 - DNA, 16 bp, Homo sapiens
accagaaggtgatcca

SEQ ID NO: 86721 - DNA, 20 bp, Homo sapiens
caaagggatgcaaaaaaaat

SEQ ID NO: 86722 - DNA, 18 bp, Homo sapiens
cgcgccttcctgcaggcc

SEQ ID NO: 86723 - DNA, 18 bp, Homo sapiens
cacttcaaagaaaaagca

SEQ ID NO: 86724 - DNA, 20 bp, Homo sapiens
taccttttttgcactcttat

SEQ ID NO: 86725 - DNA, 16 bp, Homo sapiens
aagctggcactgccgc

SEQ ID NO: 86726 - DNA, 24 bp, Homo sapiens
ctgaacggaaagaggatgagtact

SEQ ID NO: 86727 - DNA, 16 bp, Homo sapiens
tagaggtggctcctcc

SEQ ID NO: 86728 - DNA, 16 bp, Homo sapiens
gtgaaagacgccggat

SEQ ID NO: 86729 - DNA, 16 bp, Homo sapiens
gccgtctcagccgaga

SEQ ID NO: 86730 - DNA, 23 bp, Homo sapiens
agagcagacactgcagcacgggc

SEQ ID NO: 86731 - DNA, 17 bp, Homo sapiens
cagcgaaaggcacacac

SEQ ID NO: 86732 - DNA, 24 bp, Homo sapiens
gccagcgggcgtcaaccccgactt

SEQ ID NO: 86733 - DNA, 23 bp, Homo sapiens
gcgtgcgtgtgcgtgtgcgtgtg

SEQ ID NO: 86734 - DNA, 19 bp, Homo sapiens
gatcatctggttgacggtc

SEQ ID NO: 86735 - DNA, 20 bp, Homo sapiens
cagccgtgccgggaccacca

SEQ ID NO: 86736 - DNA, 18 bp, Homo sapiens
ctgccccatccagcctgc

SEQ ID NO: 86737 - DNA, 18 bp, Homo sapiens
ccgccgcccaccccggcc

SEQ ID NO: 86738 - DNA, 16 bp, Homo sapiens
accatgggcactagga

SEQ ID NO: 86739 - DNA, 24 bp, Homo sapiens
gaagacgaggtgcccgacgacgag

SEQ ID NO: 86740 - DNA, 18 bp, Homo sapiens
gaggtgggagtgggctgc

SEQ ID NO: 86741 - DNA, 23 bp, Homo sapiens
aggtcagccactgaaaaatcgag

SEQ ID NO: 86742 - DNA, 16 bp, Homo sapiens
cggcttccgcttgggg

SEQ ID NO: 86743 - DNA, 16 bp, Homo sapiens
agaaaggcccttctga

SEQ ID NO: 86744 - DNA, 18 bp, Homo sapiens
cagccgctccacctccgc

SEQ ID NO: 86745 - DNA, 22 bp, Homo sapiens
cctgcatgctgatgcctctccc

SEQ ID NO: 86746 - DNA, 24 bp, Homo sapiens
agtccacctccttgcggtggcggg

SEQ ID NO: 86747 - DNA, 20 bp, Homo sapiens
caggcgcgaggaggcccgca

SEQ ID NO: 86748 - DNA, 22 bp, Homo sapiens
ctgctgggcctctccagcatgt

SEQ ID NO: 86749 - DNA, 24 bp, Homo sapiens
agctcccctcgtggatcatcaagg

SEQ ID NO: 86750 - DNA, 22 bp, Homo sapiens
agtcctggcggtgggccctttg

SEQ ID NO: 86751 - DNA, 21 bp, Homo sapiens
aggagaagatgttcggccgtg

SEQ ID NO: 86752 - DNA, 20 bp, Homo sapiens
tcggctgcctgcggagcctg

SEQ ID NO: 86753 - DNA, 22 bp, Homo sapiens
gagaagcagtggctcaaggtac

SEQ ID NO: 86754 - DNA, 19 bp, Homo sapiens
gccaagatcgcaccactgc

SEQ ID NO: 86755 - DNA, 24 bp, Homo sapiens
ggccacgctggaattgtagcccac

SEQ ID NO: 86756 - DNA, 24 bp, Homo sapiens
aaaaagggaaatgacctaaatgcc

SEQ ID NO: 86757 - DNA, 16 bp, Homo sapiens
caccaccagaactctc

SEQ ID NO: 86758 - DNA, 23 bp, Homo sapiens
tgcactgaaacactaaacagaca

SEQ ID NO: 86759 - DNA, 16 bp, Homo sapiens
tagtacacagttcagg

SEQ ID NO: 86760 - DNA, 16 bp, Homo sapiens
cacagccagcagtgtg

SEQ ID NO: 86761 - DNA, 21 bp, Homo sapiens
gctgggcatttaaaaaaatat

SEQ ID NO: 86762 - DNA, 22 bp, Homo sapiens
gcacacgtgcgtcaaaggtggg

SEQ ID NO: 86763 - DNA, 24 bp, Homo sapiens
caggcaccccttgagagtcccagt

SEQ ID NO: 86764 - DNA, 23 bp, Homo sapiens
cttctgccggacctcctcttcga

SEQ ID NO: 86765 - DNA, 24 bp, Homo sapiens
gagcgggtgcgggggccctcctcc

SEQ ID NO: 86766 - DNA, 22 bp, Homo sapiens
tgctggtggtcggggtggagga

SEQ ID NO: 86767 - DNA, 23 bp, Homo sapiens
cttgtcgacctgggtgctggctg

SEQ ID NO: 86768 - DNA, 16 bp, Homo sapiens
ggccgcccgcgcttct

SEQ ID NO: 86769 - DNA, 20 bp, Homo sapiens
gaggagggcacgctggagga

SEQ ID NO: 86770 - DNA, 21 bp, Homo sapiens
ccacaatcttcttcatcttct

SEQ ID NO: 86771 - DNA, 18 bp, Homo sapiens
caagcgagacagcgacgc

SEQ ID NO: 86772 - DNA, 16 bp, Homo sapiens
cccccgccctccccgc

SEQ ID NO: 86773 - DNA, 16 bp, Homo sapiens
gagagcaagaagcaga

SEQ ID NO: 86774 - DNA, 22 bp, Homo sapiens
tgagcggcccaagcctgagtgt

SEQ ID NO: 86775 - DNA, 18 bp, Homo sapiens
cacccaacctcaccaaga

SEQ ID NO: 86776 - DNA, 16 bp, Homo sapiens
caggctcaaagacaca

SEQ ID NO: 86777 - DNA, 21 bp, Homo sapiens
ctcgggcagctcctttcgcga

SEQ ID NO: 86778 - DNA, 20 bp, Homo sapiens
tccttaaacaatgtgggaac

SEQ ID NO: 86779 - DNA, 19 bp, Homo sapiens
aacgtcagggttaccttta

SEQ ID NO: 86780 - DNA, 16 bp, Homo sapiens
gggtgatagccgccgg

SEQ ID NO: 86781 - DNA, 20 bp, Homo sapiens
tctcagatgggggtgcccct

SEQ ID NO: 86782 - DNA, 20 bp, Homo sapiens
cttcatccagctgccctcgc

SEQ ID NO: 86783 - DNA, 16 bp, Homo sapiens
aaccaggtagcccaag

SEQ ID NO: 86784 - DNA, 21 bp, Homo sapiens
tggacttcaagaagataaagg

SEQ ID NO: 86785 - DNA, 24 bp, Homo sapiens
catgcctagtgagccaggttaccg

SEQ ID NO: 86786 - DNA, 16 bp, Homo sapiens
ctggcacaggagcatg

SEQ ID NO: 86787 - DNA, 23 bp, Homo sapiens
aatcctagcccgtggggtctcca

SEQ ID NO: 86788 - DNA, 17 bp, Homo sapiens
ccatccccaacccccag

SEQ ID NO: 86789 - DNA, 23 bp, Homo sapiens
ggtaagacctgctcctcccgtcc

SEQ ID NO: 86790 - DNA, 17 bp, Homo sapiens
ccatcaattcagaaggg

SEQ ID NO: 86791 - DNA, 23 bp, Homo sapiens
caacgacctagagaaggacgtca

SEQ ID NO: 86792 - DNA, 24 bp, Homo sapiens
ctggtgaagaccgactgcaagacg

SEQ ID NO: 86793 - DNA, 19 bp, Homo sapiens
gcattggccactgatcagc

SEQ ID NO: 86794 - DNA, 16 bp, Homo sapiens
tcactctcctcgcctt

SEQ ID NO: 86795 - DNA, 24 bp, Homo sapiens
cagggccgggcaggcagccctcca

SEQ ID NO: 86796 - DNA, 21 bp, Homo sapiens
cccggcgtcctgaaccccccc

SEQ ID NO: 86797 - DNA, 23 bp, Homo sapiens
gatctatgaagactccatcgtct

SEQ ID NO: 86798 - DNA, 16 bp, Homo sapiens
gagggctgtgaaaagc

SEQ ID NO: 86799 - DNA, 24 bp, Homo sapiens
aaatcgagaaggaggatgacagtg

SEQ ID NO: 86800 - DNA, 17 bp, Homo sapiens
gaaagacagccttgagc

SEQ ID NO: 86801 - DNA, 17 bp, Homo sapiens
aatccgaatgtgagtcc

SEQ ID NO: 86802 - DNA, 23 bp, Homo sapiens
tgccttctccttccggccaagct

SEQ ID NO: 86803 - DNA, 24 bp, Homo sapiens
gcccgagagcccccaaggccccag

SEQ ID NO: 86804 - DNA, 23 bp, Homo sapiens
actcacgaccggcttggctcggg

SEQ ID NO: 86805 - DNA, 20 bp, Homo sapiens
tgctgcattcccagagctca

SEQ ID NO: 86806 - DNA, 22 bp, Homo sapiens
cctgctcgggggcccggcctca

SEQ ID NO: 86807 - DNA, 21 bp, Homo sapiens
ggtccgtcaaagtgaagatca

SEQ ID NO: 86808 - DNA, 21 bp, Homo sapiens
gagcaccgccccacagggctg

SEQ ID NO: 86809 - DNA, 17 bp, Homo sapiens
ccggcggcggccgagcc

SEQ ID NO: 86810 - DNA, 20 bp, Homo sapiens
ggggtcagccatggcaggtc

SEQ ID NO: 86811 - DNA, 23 bp, Homo sapiens
gaggaggaacaagaggaggtgag

SEQ ID NO: 86812 - DNA, 18 bp, Homo sapiens
cttggccttccaaagtgc

SEQ ID NO: 86813 - DNA, 16 bp, Homo sapiens
gagactggaatgtcgg

SEQ ID NO: 86814 - DNA, 18 bp, Homo sapiens
gttttcttgagcaagttt

SEQ ID NO: 86815 - DNA, 16 bp, Homo sapiens
tacccgttactgctaa

SEQ ID NO: 86816 - DNA, 16 bp, Homo sapiens
gggtggccaacgcaca

SEQ ID NO: 86817 - DNA, 23 bp, Homo sapiens
gctgtataaatatggaagattct

SEQ ID NO: 86818 - DNA, 23 bp, Homo sapiens
gaagtggcagcgaagaagactga

SEQ ID NO: 86819 - DNA, 24 bp, Homo sapiens
gaagggaggggacacgcggagcag

SEQ ID NO: 86820 - DNA, 19 bp, Homo sapiens
ctgcggggcatcttccgcc

SEQ ID NO: 86821 - DNA, 22 bp, Homo sapiens
gctcgcacggctcgggcaagcc

SEQ ID NO: 86822 - DNA, 23 bp, Homo sapiens
ccagtgacaatgaccgcctgcgc

SEQ ID NO: 86823 - DNA, 22 bp, Homo sapiens
ggaggctggcccagggcggtcc

SEQ ID NO: 86824 - DNA, 23 bp, Homo sapiens
caagagccgcgacaaggccaagc

SEQ ID NO: 86825 - DNA, 24 bp, Homo sapiens
ccttgaccaaggagctctctggca

SEQ ID NO: 86826 - DNA, 24 bp, Homo sapiens
agtcggtggacaagaacagcaacg

SEQ ID NO: 86827 - DNA, 24 bp, Homo sapiens
ggctcagctgttccacccgcttgc

SEQ ID NO: 86828 - DNA, 18 bp, Homo sapiens
caccccgacctccgcgcg

SEQ ID NO: 86829 - DNA, 24 bp, Homo sapiens
cttctgctgcgtctccacgttgcg

SEQ ID NO: 86830 - DNA, 16 bp, Homo sapiens
ctcggtgccgccggcc

SEQ ID NO: 86831 - DNA, 24 bp, Homo sapiens
tgttgttgcgctcgcgccgcaccc

SEQ ID NO: 86832 - DNA, 21 bp, Homo sapiens
acctgcagcccggtcacccca

SEQ ID NO: 86833 - DNA, 19 bp, Homo sapiens
cccgcgccgctgccgccac

SEQ ID NO: 86834 - DNA, 16 bp, Homo sapiens
cctggccgccccgcac

SEQ ID NO: 86835 - DNA, 21 bp, Homo sapiens
cgcgctgccagggcccggcag

SEQ ID NO: 86836 - DNA, 17 bp, Homo sapiens
cttaccagccgccgccg

SEQ ID NO: 86837 - DNA, 19 bp, Homo sapiens
gtgggcggcggcgtggggt

SEQ ID NO: 86838 - DNA, 22 bp, Homo sapiens
gtgatcaagcaggagccccgcg

SEQ ID NO: 86839 - DNA, 24 bp, Homo sapiens
cgcagtgcgcgatctggaactgca

SEQ ID NO: 86840 - DNA, 23 bp, Homo sapiens
ctacctggacggcaggctggagc

SEQ ID NO: 86841 - DNA, 16 bp, Homo sapiens
tgcgagggcggcggcg

SEQ ID NO: 86842 - DNA, 22 bp, Homo sapiens
gtcatgcccgggggagcgcacg

SEQ ID NO: 86843 - DNA, 16 bp, Homo sapiens
cttcatcctcctcgcg

SEQ ID NO: 86844 - DNA, 21 bp, Homo sapiens
gcggcggcggcggcggcgact

SEQ ID NO: 86845 - DNA, 24 bp, Homo sapiens
cgccccgacgcgctcgtacagggg

SEQ ID NO: 86846 - DNA, 24 bp, Homo sapiens
ttcctggccgacctgttccagcac

SEQ ID NO: 86847 - DNA, 22 bp, Homo sapiens
cagccgtagccgggcgggggcc

SEQ ID NO: 86848 - DNA, 24 bp, Homo sapiens
cacgagacgtccatcgacatcagc

SEQ ID NO: 86849 - DNA, 24 bp, Homo sapiens
gcgggcgcgcccgggtagtcaaag

SEQ ID NO: 86850 - DNA, 19 bp, Homo sapiens
ccccgcgcagcctcccgcc

SEQ ID NO: 86851 - DNA, 24 bp, Homo sapiens
cttggccttctcctgctgccggct

SEQ ID NO: 86852 - DNA, 22 bp, Homo sapiens
cacctgcagagccccccgcacg

SEQ ID NO: 86853 - DNA, 17 bp, Homo sapiens
gtcgatgtaggcgctga

SEQ ID NO: 86854 - DNA, 21 bp, Homo sapiens
ctaactcccccatggagtcgg

SEQ ID NO: 86855 - DNA, 22 bp, Homo sapiens
cagcggctccggggcggcaggt

SEQ ID NO: 86856 - DNA, 18 bp, Homo sapiens
gacgccccgcgcaggctg

SEQ ID NO: 86857 - DNA, 24 bp, Homo sapiens
agccgaaggcggcgctgctgggcg

SEQ ID NO: 86858 - DNA, 16 bp, Homo sapiens
cgggccattcgcgacc

SEQ ID NO: 86859 - DNA, 22 bp, Homo sapiens
ccgcggctccgcctcgtagaag

SEQ ID NO: 86860 - DNA, 16 bp, Homo sapiens
gcctcggactctaggg

SEQ ID NO: 86861 - DNA, 22 bp, Homo sapiens
catggcgagcctcggcggcctc

SEQ ID NO: 86862 - DNA, 22 bp, Homo sapiens
atgccggccgcgcgctaggacc

SEQ ID NO: 86863 - DNA, 17 bp, Homo sapiens
ccgcgcccgcgcacctc

SEQ ID NO: 86864 - DNA, 24 bp, Homo sapiens
tctggaatgtgctcccaccccact

SEQ ID NO: 86865 - DNA, 17 bp, Homo sapiens
cgctttgggggcacccc

SEQ ID NO: 86866 - DNA, 20 bp, Homo sapiens
tccagagtaggaaaaggctc

SEQ ID NO: 86867 - DNA, 21 bp, Homo sapiens
caggtcctcctcgaattggga

SEQ ID NO: 86868 - DNA, 19 bp, Homo sapiens
ggtgtctccggtcagaacc

SEQ ID NO: 86869 - DNA, 21 bp, Homo sapiens
ctcctcctcctgctcctgcag

SEQ ID NO: 86870 - DNA, 24 bp, Homo sapiens
gatggcaagcggcggccaggccca

SEQ ID NO: 86871 - DNA, 17 bp, Homo sapiens
aacctccaactccaagc

SEQ ID NO: 86872 - DNA, 24 bp, Homo sapiens
gatgatgatgatgcacctcggcca

SEQ ID NO: 86873 - DNA, 16 bp, Homo sapiens
gctttgcagctgactc

SEQ ID NO: 86874 - DNA, 19 bp, Homo sapiens
atggaggcagaacacaggc

SEQ ID NO: 86875 - DNA, 23 bp, Homo sapiens
cacacaggctgcacggggtggaa

SEQ ID NO: 86876 - DNA, 22 bp, Homo sapiens
ggagggggttgcagacggtaag

SEQ ID NO: 86877 - DNA, 23 bp, Homo sapiens
tgattctggccctgacccttgac

SEQ ID NO: 86878 - DNA, 16 bp, Homo sapiens
ggggtccagcgctggt

SEQ ID NO: 86879 - DNA, 17 bp, Homo sapiens
gcctggctcctttcaga

SEQ ID NO: 86880 - DNA, 22 bp, Homo sapiens
ataacccctaaactcacccaca

SEQ ID NO: 86881 - DNA, 24 bp, Homo sapiens
catgtactccacttccttcccttc

SEQ ID NO: 86882 - DNA, 24 bp, Homo sapiens
ggccagaggggctgacctggcccg

SEQ ID NO: 86883 - DNA, 16 bp, Homo sapiens
tggcttcggcccacac

SEQ ID NO: 86884 - DNA, 22 bp, Homo sapiens
tggcaaccagaggggcagagcc

SEQ ID NO: 86885 - DNA, 21 bp, Homo sapiens
agttggagattgaccattatg

SEQ ID NO: 86886 - DNA, 24 bp, Homo sapiens
atgaggctggagatgggaaccagg

SEQ ID NO: 86887 - DNA, 20 bp, Homo sapiens
cacaggcacggagccgcggg

SEQ ID NO: 86888 - DNA, 24 bp, Homo sapiens
caggggcaggagtgccccaggctg

SEQ ID NO: 86889 - DNA, 21 bp, Homo sapiens
aagccgtggatgtggcagcag

SEQ ID NO: 86890 - DNA, 16 bp, Homo sapiens
ctgagaggcatggccg

SEQ ID NO: 86891 - DNA, 16 bp, Homo sapiens
gaggggctgggtaggg

SEQ ID NO: 86892 - DNA, 23 bp, Homo sapiens
cctgtgcctggggggcccccacc

SEQ ID NO: 86893 - DNA, 22 bp, Homo sapiens
gctcgggcccgaaacctggtgt

SEQ ID NO: 86894 - DNA, 21 bp, Homo sapiens
gtcaccgatgaggggttctct

SEQ ID NO: 86895 - DNA, 16 bp, Homo sapiens
cccgcgactgtcccgg

SEQ ID NO: 86896 - DNA, 24 bp, Homo sapiens
tacaccccagcgccccctggtgag

SEQ ID NO: 86897 - DNA, 23 bp, Homo sapiens
agcactcactctctcgggagcac

SEQ ID NO: 86898 - DNA, 24 bp, Homo sapiens
cccctgcacctctgatcatccctc

SEQ ID NO: 86899 - DNA, 23 bp, Homo sapiens
tggaagaagctgggaccagccaa

SEQ ID NO: 86900 - DNA, 23 bp, Homo sapiens
aacgggagctgaacttggccatc

SEQ ID NO: 86901 - DNA, 16 bp, Homo sapiens
caggaacggggagggg

SEQ ID NO: 86902 - DNA, 24 bp, Homo sapiens
ggccggccgtgctggctgtggaac

SEQ ID NO: 86903 - DNA, 16 bp, Homo sapiens
atgccctgttccagga

SEQ ID NO: 86904 - DNA, 17 bp, Homo sapiens
gtcccctcgggaggcca

SEQ ID NO: 86905 - DNA, 20 bp, Homo sapiens
ggatctcaaagtcgacgttg

SEQ ID NO: 86906 - DNA, 24 bp, Homo sapiens
catgtttgggtaccacgggcacgg

SEQ ID NO: 86907 - DNA, 24 bp, Homo sapiens
tcagtggacaggggctgcccgagg

SEQ ID NO: 86908 - DNA, 20 bp, Homo sapiens
ctcgtggccccggcccgccg

SEQ ID NO: 86909 - DNA, 23 bp, Homo sapiens
cagccagttgcagccgacgatgt

SEQ ID NO: 86910 - DNA, 24 bp, Homo sapiens
cagcttcgcgccctacgaggccaa

SEQ ID NO: 86911 - DNA, 19 bp, Homo sapiens
gggaagccctgcaccttct

SEQ ID NO: 86912 - DNA, 16 bp, Homo sapiens
gcctctatccccaccc

SEQ ID NO: 86913 - DNA, 23 bp, Homo sapiens
cctgtgggcatgggtgggtcagc

SEQ ID NO: 86914 - DNA, 23 bp, Homo sapiens
ctccaggttcatggtggacacgg

SEQ ID NO: 86915 - DNA, 24 bp, Homo sapiens
ttccggtgggtgactgaccacgtc

SEQ ID NO: 86916 - DNA, 24 bp, Homo sapiens
aaatacgccctgaggctgaaggag

SEQ ID NO: 86917 - DNA, 24 bp, Homo sapiens
ccggcgcactcgatatcgaagctg

SEQ ID NO: 86918 - DNA, 24 bp, Homo sapiens
gggagctggtaccctgctgccacc

SEQ ID NO: 86919 - DNA, 21 bp, Homo sapiens
ccccgacttggcacatcaatg

SEQ ID NO: 86920 - DNA, 20 bp, Homo sapiens
cggacgtgctgtggtctgac

SEQ ID NO: 86921 - DNA, 16 bp, Homo sapiens
ccccggcaccttcatg

SEQ ID NO: 86922 - DNA, 20 bp, Homo sapiens
attgcgcccttgcgcgtgct

SEQ ID NO: 86923 - DNA, 23 bp, Homo sapiens
cacctccaggccatctccacacc

SEQ ID NO: 86924 - DNA, 22 bp, Homo sapiens
agatctggatgacagggtcccg

SEQ ID NO: 86925 - DNA, 24 bp, Homo sapiens
cagggtgagccacgtagggccggc

SEQ ID NO: 86926 - DNA, 18 bp, Homo sapiens
gtgagcgccaggcgtagg

SEQ ID NO: 86927 - DNA, 24 bp, Homo sapiens
agcctccctgctgtgttgggagtg

SEQ ID NO: 86928 - DNA, 16 bp, Homo sapiens
cctccttctcgtagct

SEQ ID NO: 86929 - DNA, 24 bp, Homo sapiens
ctcgcaggcatcttccctgagcct

SEQ ID NO: 86930 - DNA, 17 bp, Homo sapiens
ctggcggggaccccggg

SEQ ID NO: 86931 - DNA, 22 bp, Homo sapiens
cgctggggggagccggagccct

SEQ ID NO: 86932 - DNA, 23 bp, Homo sapiens
cacccacccagacccacagacat

SEQ ID NO: 86933 - DNA, 19 bp, Homo sapiens
gtgccaaggtgcagagcta

SEQ ID NO: 86934 - DNA, 16 bp, Homo sapiens
gaacccagaggggaag

SEQ ID NO: 86935 - DNA, 23 bp, Homo sapiens
atgatacggatgaaggtggacca

SEQ ID NO: 86936 - DNA, 17 bp, Homo sapiens
caattaggcttgagcac

SEQ ID NO: 86937 - DNA, 20 bp, Homo sapiens
atgaggtacggaaggtcgaa

SEQ ID NO: 86938 - DNA, 24 bp, Homo sapiens
ctggggttctagaacattctggaa

SEQ ID NO: 86939 - DNA, 24 bp, Homo sapiens
gggcatctgagagaagcctcccac

SEQ ID NO: 86940 - DNA, 24 bp, Homo sapiens
gacccaatgtgctcccacccccag

SEQ ID NO: 86941 - DNA, 16 bp, Homo sapiens
gccatgtggagaggga

SEQ ID NO: 86942 - DNA, 22 bp, Homo sapiens
gtgatcaccggttacaacatcc

SEQ ID NO: 86943 - DNA, 16 bp, Homo sapiens
aggcctaggctgcccc

SEQ ID NO: 86944 - DNA, 18 bp, Homo sapiens
ccacccacacccagcccc

SEQ ID NO: 86945 - DNA, 16 bp, Homo sapiens
cccggatgttggagca

SEQ ID NO: 86946 - DNA, 24 bp, Homo sapiens
ccctagggttgttataaggatgtt

SEQ ID NO: 86947 - DNA, 16 bp, Homo sapiens
ccaccatgctgacaac

SEQ ID NO: 86948 - DNA, 16 bp, Homo sapiens
cagcctgctgcacacc

SEQ ID NO: 86949 - DNA, 18 bp, Homo sapiens
ccttccaaggacagggac

SEQ ID NO: 86950 - DNA, 24 bp, Homo sapiens
ctgggccgtgtggccggcctttgc

SEQ ID NO: 86951 - DNA, 22 bp, Homo sapiens
tgtactcccgcagcagcaccta

SEQ ID NO: 86952 - DNA, 21 bp, Homo sapiens
cgggccggcgggacaccaagg

SEQ ID NO: 86953 - DNA, 23 bp, Homo sapiens
cgtcctccttctgctcgcccagg

SEQ ID NO: 86954 - DNA, 24 bp, Homo sapiens
ctgcaggtatgggcgggaggtggg

SEQ ID NO: 86955 - DNA, 24 bp, Homo sapiens
gtgagaggtcagggaggcagcagg

SEQ ID NO: 86956 - DNA, 23 bp, Homo sapiens
caccagcccacccacccacctag

SEQ ID NO: 86957 - DNA, 24 bp, Homo sapiens
tgggggcgtgaagttgaggtcaga

SEQ ID NO: 86958 - DNA, 18 bp, Homo sapiens
caatgccgtgagcttcca

SEQ ID NO: 86959 - DNA, 24 bp, Homo sapiens
aaaagtgggcgtcaggtaaggtca

SEQ ID NO: 86960 - DNA, 20 bp, Homo sapiens
gtacacagccaggcggcggc

SEQ ID NO: 86961 - DNA, 24 bp, Homo sapiens
ctgcccgcctcacctcccaggccc

SEQ ID NO: 86962 - DNA, 23 bp, Homo sapiens
tccacggcgttcaccagcaccat

SEQ ID NO: 86963 - DNA, 24 bp, Homo sapiens
tccttctcctgctccacctcccac

SEQ ID NO: 86964 - DNA, 24 bp, Homo sapiens
acctgctggccacgactgagcagg

SEQ ID NO: 86965 - DNA, 22 bp, Homo sapiens
ccagaatgggaacgaccagacc

SEQ ID NO: 86966 - DNA, 23 bp, Homo sapiens
tggggggtggcgaggacaagtct

SEQ ID NO: 86967 - DNA, 24 bp, Homo sapiens
ccactgcggctgctggagcggctc

SEQ ID NO: 86968 - DNA, 21 bp, Homo sapiens
agaaaaagtgcatccaggatg

SEQ ID NO: 86969 - DNA, 24 bp, Homo sapiens
agggtcactggcgtgcccctcagc

SEQ ID NO: 86970 - DNA, 19 bp, Homo sapiens
gaggggagaaggtgggaaa

SEQ ID NO: 86971 - DNA, 24 bp, Homo sapiens
agctgttgcggcaggtcagtagcc

SEQ ID NO: 86972 - DNA, 20 bp, Homo sapiens
tgtagtcctcgccgccctct

SEQ ID NO: 86973 - DNA, 24 bp, Homo sapiens
gtctgtggccccctccaggcaatg

SEQ ID NO: 86974 - DNA, 19 bp, Homo sapiens
taaaaactgcacccagcct

SEQ ID NO: 86975 - DNA, 17 bp, Homo sapiens
tcaaactcctgagctca

SEQ ID NO: 86976 - DNA, 16 bp, Homo sapiens
gatgcccgtggtgaag

SEQ ID NO: 86977 - DNA, 26 bp, Homo sapiens
ataaaaataaataaaaataaaaaaat

SEQ ID NO: 86978 - DNA, 23 bp, Homo sapiens
accacacctggctaatttttaaa

SEQ ID NO: 86979 - DNA, 16 bp, Homo sapiens
ggagttcccatgccgc

SEQ ID NO: 86980 - DNA, 24 bp, Homo sapiens
ggctgatctgaaactcctgagttc

SEQ ID NO: 86981 - DNA, 22 bp, Homo sapiens
aagtccagggtggcgatgggga

SEQ ID NO: 86982 - DNA, 16 bp, Homo sapiens
tgcaggagcgagcact

SEQ ID NO: 86983 - DNA, 16 bp, Homo sapiens
ggtgtaacacaggttg

SEQ ID NO: 86984 - DNA, 22 bp, Homo sapiens
aggccacaagacagggcggggg

SEQ ID NO: 86985 - DNA, 16 bp, Homo sapiens
acacatgctgaattgg

SEQ ID NO: 86986 - DNA, 24 bp, Homo sapiens
ctgctcccctcccaggtactacga

SEQ ID NO: 86987 - DNA, 24 bp, Homo sapiens
atctctgggcctgtgcctatgccc

SEQ ID NO: 86988 - DNA, 24 bp, Homo sapiens
acccgtccatcatgatggcccaca

SEQ ID NO: 86989 - DNA, 24 bp, Homo sapiens
acggtcctggccttggccatgagc

SEQ ID NO: 86990 - DNA, 16 bp, Homo sapiens
ggggggctcagtctgg

SEQ ID NO: 86991 - DNA, 20 bp, Homo sapiens
cttcacaaactcgtccccgg

SEQ ID NO: 86992 - DNA, 20 bp, Homo sapiens
gtgcttgaggggcctgcgtg

SEQ ID NO: 86993 - DNA, 22 bp, Homo sapiens
ctcttccgggcactgagcaggt

SEQ ID NO: 86994 - DNA, 22 bp, Homo sapiens
ctggagcaggagggtggccggc

SEQ ID NO: 86995 - DNA, 21 bp, Homo sapiens
ggattgcccagaggccccaac

SEQ ID NO: 86996 - DNA, 24 bp, Homo sapiens
atcagttcatcaggacccccaccg

SEQ ID NO: 86997 - DNA, 19 bp, Homo sapiens
cacgcacagctgagggcag

SEQ ID NO: 86998 - DNA, 24 bp, Homo sapiens
ggctgctgccccagatcctggaga

SEQ ID NO: 86999 - DNA, 20 bp, Homo sapiens
cagctcggccttggccctgc

SEQ ID NO: 87000 - DNA, 23 bp, Homo sapiens
cccctcctggcagcttccttttg

SEQ ID NO: 87001 - DNA, 18 bp, Homo sapiens
agcgccagctgccgtcca

SEQ ID NO: 87002 - DNA, 20 bp, Homo sapiens
tacatggcactcacttccag

SEQ ID NO: 87003 - DNA, 22 bp, Homo sapiens
ctccaggcacggcaacttgccc

SEQ ID NO: 87004 - DNA, 24 bp, Homo sapiens
cctgagtgtgctttccccgtgttc

SEQ ID NO: 87005 - DNA, 22 bp, Homo sapiens
cacagggggcccacctgccccc

SEQ ID NO: 87006 - DNA, 24 bp, Homo sapiens
accccctccggcgccaggtcctgg

SEQ ID NO: 87007 - DNA, 24 bp, Homo sapiens
gagttggggtgcccagtcctctgg

SEQ ID NO: 87008 - DNA, 21 bp, Homo sapiens
gtatacggcttcactggcgcc

SEQ ID NO: 87009 - DNA, 20 bp, Homo sapiens
aaggaatggaccaattgctc

SEQ ID NO: 87010 - DNA, 16 bp, Homo sapiens
gcagatttgggaactg

SEQ ID NO: 87011 - DNA, 23 bp, Homo sapiens
acttagactccaccagctgcttg

SEQ ID NO: 87012 - DNA, 23 bp, Homo sapiens
cctatgccactgggaaatggcag

SEQ ID NO: 87013 - DNA, 24 bp, Homo sapiens
catctcagggcagcggtgggcagc

SEQ ID NO: 87014 - DNA, 24 bp, Homo sapiens
gcccccagggcttcactccgcatg

SEQ ID NO: 87015 - DNA, 24 bp, Homo sapiens
ccaggaggcacggggacatggggg

SEQ ID NO: 87016 - DNA, 22 bp, Homo sapiens
gacgtcagatgatcgagaaaac

SEQ ID NO: 87017 - DNA, 16 bp, Homo sapiens
ggctaatgccaacggg

SEQ ID NO: 87018 - DNA, 24 bp, Homo sapiens
gtggggggatggaagccgggccgg

SEQ ID NO: 87019 - DNA, 22 bp, Homo sapiens
gaggacacgccgaatcggcaca

SEQ ID NO: 87020 - DNA, 24 bp, Homo sapiens
cctgcccactctcctgttgcatcc

SEQ ID NO: 87021 - DNA, 22 bp, Homo sapiens
agtgacctgacacccagtccgc

SEQ ID NO: 87022 - DNA, 24 bp, Homo sapiens
caccagtagttgacagaagggacc

SEQ ID NO: 87023 - DNA, 24 bp, Homo sapiens
taaatgcagagcccctgacccagc

SEQ ID NO: 87024 - DNA, 21 bp, Homo sapiens
tggtgtatggtgacactgact

SEQ ID NO: 87025 - DNA, 22 bp, Homo sapiens
gtggcttttgtgaacccaaaga

SEQ ID NO: 87026 - DNA, 20 bp, Homo sapiens
gatggccctggggcgggagg

SEQ ID NO: 87027 - DNA, 23 bp, Homo sapiens
aggcttcccaaaccaaggcccca

SEQ ID NO: 87028 - DNA, 19 bp, Homo sapiens
agccacttccagccataca

SEQ ID NO: 87029 - DNA, 23 bp, Homo sapiens
aggcccgcgtagcgcttcttgct

SEQ ID NO: 87030 - DNA, 24 bp, Homo sapiens
acggctcccatgtcctcaaactgc

SEQ ID NO: 87031 - DNA, 17 bp, Homo sapiens
ctccaggcccttgcagt

SEQ ID NO: 87032 - DNA, 24 bp, Homo sapiens
cgtctccagattggggcttggcct

SEQ ID NO: 87033 - DNA, 23 bp, Homo sapiens
gcaggcggcgcagtgaggcagtg

SEQ ID NO: 87034 - DNA, 24 bp, Homo sapiens
ctacttcccatacctgcttatcag

SEQ ID NO: 87035 - DNA, 23 bp, Homo sapiens
gggaggaggggtttggggcccag

SEQ ID NO: 87036 - DNA, 21 bp, Homo sapiens
gcccgacgcccacgaccgcat

SEQ ID NO: 87037 - DNA, 24 bp, Homo sapiens
gggcctggacccgtgggtctgagg

SEQ ID NO: 87038 - DNA, 22 bp, Homo sapiens
ccccctcgtggccaacctggtc

SEQ ID NO: 87039 - DNA, 24 bp, Homo sapiens
tctaagagaggaaggggctggggg

SEQ ID NO: 87040 - DNA, 22 bp, Homo sapiens
gagccaccgcgccctcagggtc

SEQ ID NO: 87041 - DNA, 19 bp, Homo sapiens
ctatggtaggaagggcccc

SEQ ID NO: 87042 - DNA, 19 bp, Homo sapiens
atgaccagctgggagatat

SEQ ID NO: 87043 - DNA, 16 bp, Homo sapiens
ctgagacccgtggagg

SEQ ID NO: 87044 - DNA, 19 bp, Homo sapiens
cagctccacgtgggcctgc

SEQ ID NO: 87045 - DNA, 24 bp, Homo sapiens
gctgtgcggcccgctctcctacag

SEQ ID NO: 87046 - DNA, 23 bp, Homo sapiens
cagctggcaggaaggagggggtt

SEQ ID NO: 87047 - DNA, 24 bp, Homo sapiens
catctcggacctgctgtgcaaccg

SEQ ID NO: 87048 - DNA, 16 bp, Homo sapiens
gagggcaggtgggtgg

SEQ ID NO: 87049 - DNA, 22 bp, Homo sapiens
gcggcctccgactatgccggca

SEQ ID NO: 87050 - DNA, 23 bp, Homo sapiens
tcgcccaggctgggcgcactccc

SEQ ID NO: 87051 - DNA, 20 bp, Homo sapiens
gggcgggtggcctggccaga

SEQ ID NO: 87052 - DNA, 23 bp, Homo sapiens
gacttcatgtaggcggccacacc

SEQ ID NO: 87053 - DNA, 24 bp, Homo sapiens
ttcctacaccctcgcccccacccc

SEQ ID NO: 87054 - DNA, 24 bp, Homo sapiens
aagcagaagtgagagcgagggggc

SEQ ID NO: 87055 - DNA, 24 bp, Homo sapiens
ctccacgcaggatgaggaagcggg

SEQ ID NO: 87056 - DNA, 16 bp, Homo sapiens
cccacagggcacggga

SEQ ID NO: 87057 - DNA, 24 bp, Homo sapiens
tgatcatcagtgccgccaagggtg

SEQ ID NO: 87058 - DNA, 24 bp, Homo sapiens
acagactctgtggcccagagactc

SEQ ID NO: 87059 - DNA, 22 bp, Homo sapiens
tagtactgcgtgtcaatgggca

SEQ ID NO: 87060 - DNA, 24 bp, Homo sapiens
ccccccccatgtcacagcccgcag

SEQ ID NO: 87061 - DNA, 24 bp, Homo sapiens
ccctcgcccaggatgggctcgaag

SEQ ID NO: 87062 - DNA, 21 bp, Homo sapiens
caccccggtgccctttccctg

SEQ ID NO: 87063 - DNA, 23 bp, Homo sapiens
cccagggtgcccccagtcccctg

SEQ ID NO: 87064 - DNA, 24 bp, Homo sapiens
cccgctgttcgtgctggagcacag

SEQ ID NO: 87065 - DNA, 19 bp, Homo sapiens
tccccccctgcaggagagg

SEQ ID NO: 87066 - DNA, 23 bp, Homo sapiens
cagctggccaagcccctcctgcg

SEQ ID NO: 87067 - DNA, 16 bp, Homo sapiens
tttggcgaaggccagg

SEQ ID NO: 87068 - DNA, 24 bp, Homo sapiens
ggctgtgctactgcgtacgggggc

SEQ ID NO: 87069 - DNA, 24 bp, Homo sapiens
gtggccagggccgctcaccctggt

SEQ ID NO: 87070 - DNA, 24 bp, Homo sapiens
gatcaccggcccaccacctgcctc

SEQ ID NO: 87071 - DNA, 24 bp, Homo sapiens
atggggtgggtgtctaggatctgg

SEQ ID NO: 87072 - DNA, 24 bp, Homo sapiens
gtgctcacgggcaaggtgggcggc

SEQ ID NO: 87073 - DNA, 24 bp, Homo sapiens
ggggggtggagacaggggccaccc

SEQ ID NO: 87074 - DNA, 24 bp, Homo sapiens
ggctgccgcacagtgctcagccac

SEQ ID NO: 87075 - DNA, 23 bp, Homo sapiens
ctcggcccccaccccgggagttc

SEQ ID NO: 87076 - DNA, 17 bp, Homo sapiens
ccttctgatacagctca

SEQ ID NO: 87077 - DNA, 23 bp, Homo sapiens
tccagcctctggggactttcaga

SEQ ID NO: 87078 - DNA, 23 bp, Homo sapiens
acggcagcggctgagcagggcgc

SEQ ID NO: 87079 - DNA, 18 bp, Homo sapiens
tggctgggccccagcact

SEQ ID NO: 87080 - DNA, 17 bp, Homo sapiens
cagaggcgcgagaagcg

SEQ ID NO: 87081 - DNA, 24 bp, Homo sapiens
gagttctgccagccccgggagtct

SEQ ID NO: 87082 - DNA, 19 bp, Homo sapiens
cacacacctggtgcagatg

SEQ ID NO: 87083 - DNA, 17 bp, Homo sapiens
caggtggggaggcgggg

SEQ ID NO: 87084 - DNA, 23 bp, Homo sapiens
gaggttgggtccacaacccacag

SEQ ID NO: 87085 - DNA, 23 bp, Homo sapiens
tcccatctgaatgccctggagga

SEQ ID NO: 87086 - DNA, 22 bp, Homo sapiens
ctcacagctggaaggggatggg

SEQ ID NO: 87087 - DNA, 16 bp, Homo sapiens
ctgcacgaggacgtca

SEQ ID NO: 87088 - DNA, 20 bp, Homo sapiens
caccccccccgtgcctgctg

SEQ ID NO: 87089 - DNA, 23 bp, Homo sapiens
ctcctggtcttccaggtccttcc

SEQ ID NO: 87090 - DNA, 24 bp, Homo sapiens
gggcagcaggcggggaccaaagtc

SEQ ID NO: 87091 - DNA, 24 bp, Homo sapiens
tgggatgcttgcaaggtcaccagg

SEQ ID NO: 87092 - DNA, 20 bp, Homo sapiens
cttggctggtcctgaccctg

SEQ ID NO: 87093 - DNA, 24 bp, Homo sapiens
caaagcaccatatagcaaaagtcc

SEQ ID NO: 87094 - DNA, 16 bp, Homo sapiens
aagaaggtgcggaagg

SEQ ID NO: 87095 - DNA, 23 bp, Homo sapiens
gagggtcccagccaaggccaggg

SEQ ID NO: 87096 - DNA, 17 bp, Homo sapiens
ctggacctgaggcctgg

SEQ ID NO: 87097 - DNA, 16 bp, Homo sapiens
acctacagcgagatcc

SEQ ID NO: 87098 - DNA, 16 bp, Homo sapiens
caacatggcgccctcc

SEQ ID NO: 87099 - DNA, 24 bp, Homo sapiens
ggcccagggcccgggatcccggcg

SEQ ID NO: 87100 - DNA, 23 bp, Homo sapiens
gctcaaccccagcctcccgaacc

SEQ ID NO: 87101 - DNA, 23 bp, Homo sapiens
gaaggcggcggcccgcggggccc

SEQ ID NO: 87102 - DNA, 24 bp, Homo sapiens
ggcggcgagcgctcgccgccgcgc

SEQ ID NO: 87103 - DNA, 21 bp, Homo sapiens
ctcctccaggcgcgcggaggg

SEQ ID NO: 87104 - DNA, 24 bp, Homo sapiens
cgccctcctaccacctgtactacg

SEQ ID NO: 87105 - DNA, 24 bp, Homo sapiens
tcggcctccaccacgtcgctctgg

SEQ ID NO: 87106 - DNA, 23 bp, Homo sapiens
cgccgccctaccccggctcgtcg

SEQ ID NO: 87107 - DNA, 24 bp, Homo sapiens
gtggaggcgttggtgcagggcggc

SEQ ID NO: 87108 - DNA, 24 bp, Homo sapiens
gtcacctcgggcatcggcatcggc

SEQ ID NO: 87109 - DNA, 24 bp, Homo sapiens
agaactggtaggagccggccgagg

SEQ ID NO: 87110 - DNA, 18 bp, Homo sapiens
gacccccgcatgcactat

SEQ ID NO: 87111 - DNA, 24 bp, Homo sapiens
ttggaacgggcctccctgcgcttg

SEQ ID NO: 87112 - DNA, 16 bp, Homo sapiens
acccgacctgacagcg

SEQ ID NO: 87113 - DNA, 19 bp, Homo sapiens
ccgagcccatggccgacat

SEQ ID NO: 87114 - DNA, 16 bp, Homo sapiens
tgtggcctccgcaacc

SEQ ID NO: 87115 - DNA, 21 bp, Homo sapiens
aggtgaaggcgcctggatagt

SEQ ID NO: 87116 - DNA, 22 bp, Homo sapiens
ctgggtggcttcccatcctcct

SEQ ID NO: 87117 - DNA, 23 bp, Homo sapiens
ctggcgcgggtcgctgaacgctg

SEQ ID NO: 87118 - DNA, 22 bp, Homo sapiens
atccaagaaaatcagtgcatgg

SEQ ID NO: 87119 - DNA, 19 bp, Homo sapiens
tttcacctggacgtgccag

SEQ ID NO: 87120 - DNA, 21 bp, Homo sapiens
tttactcaataatgttctgcc

SEQ ID NO: 87121 - DNA, 17 bp, Homo sapiens
taccaatacctgggatc

SEQ ID NO: 87122 - DNA, 20 bp, Homo sapiens
gctcagctgcaaagaatgtg

SEQ ID NO: 87123 - DNA, 21 bp, Homo sapiens
cctttctgattctcttcagat

SEQ ID NO: 87124 - DNA, 23 bp, Homo sapiens
aagttctgcagagagggttgtca

SEQ ID NO: 87125 - DNA, 21 bp, Homo sapiens
gggccactcatttcttattaa

SEQ ID NO: 87126 - DNA, 19 bp, Homo sapiens
aaggagaggcaatggatcc

SEQ ID NO: 87127 - DNA, 19 bp, Homo sapiens
ggcttattaaaccctggta

SEQ ID NO: 87128 - DNA, 23 bp, Homo sapiens
gtggggatggttggatctgcctt

SEQ ID NO: 87129 - DNA, 23 bp, Homo sapiens
gagaagggacacggaggaattac

SEQ ID NO: 87130 - DNA, 16 bp, Homo sapiens
ttctccctggtcacac

SEQ ID NO: 87131 - DNA, 18 bp, Homo sapiens
ctttcttctgagtctctt

SEQ ID NO: 87132 - DNA, 17 bp, Homo sapiens
ttggggtaggggagggg

SEQ ID NO: 87133 - DNA, 17 bp, Homo sapiens
gagggatggacagaaga

SEQ ID NO: 87134 - DNA, 20 bp, Homo sapiens
ggaagggaaatcttgttatt

SEQ ID NO: 87135 - DNA, 18 bp, Homo sapiens
tccaacagctcccaggtg

SEQ ID NO: 87136 - DNA, 21 bp, Homo sapiens
accctcgtgcctccctgaacc

SEQ ID NO: 87137 - DNA, 24 bp, Homo sapiens
gaaaccccagttggtctgggaagg

SEQ ID NO: 87138 - DNA, 24 bp, Homo sapiens
agtgaactggagcagctgcggcgc

SEQ ID NO: 87139 - DNA, 16 bp, Homo sapiens
gagaggcgggcagtgg

SEQ ID NO: 87140 - DNA, 17 bp, Homo sapiens
actagatgatcagacca

SEQ ID NO: 87141 - DNA, 21 bp, Homo sapiens
ctgagggttaaaggcagtgga

SEQ ID NO: 87142 - DNA, 16 bp, Homo sapiens
ctccctccttccctcc

SEQ ID NO: 87143 - DNA, 16 bp, Homo sapiens
tgggctgaccctcatg

SEQ ID NO: 87144 - DNA, 18 bp, Homo sapiens
gggaaagacaagaaaagc

SEQ ID NO: 87145 - DNA, 16 bp, Homo sapiens
aagctcccgggcttgg

SEQ ID NO: 87146 - DNA, 17 bp, Homo sapiens
ccaaattcagctggcat

SEQ ID NO: 87147 - DNA, 19 bp, Homo sapiens
acagagccatcaaaatcac

SEQ ID NO: 87148 - DNA, 22 bp, Homo sapiens
acatccccctgggggaaaggtt

SEQ ID NO: 87149 - DNA, 18 bp, Homo sapiens
agcttcactctgaccatc

SEQ ID NO: 87150 - DNA, 20 bp, Homo sapiens
accagcctggagggtgtacc

SEQ ID NO: 87151 - DNA, 23 bp, Homo sapiens
aacagatatgttcaggccaccaa

SEQ ID NO: 87152 - DNA, 18 bp, Homo sapiens
cgaggttctcggggccca

SEQ ID NO: 87153 - DNA, 16 bp, Homo sapiens
ctggtaacttgtgctg

SEQ ID NO: 87154 - DNA, 23 bp, Homo sapiens
cttgcggtgggtttgtgaagaca

SEQ ID NO: 87155 - DNA, 22 bp, Homo sapiens
tgctaaaaatattaaacttcaa

SEQ ID NO: 87156 - DNA, 21 bp, Homo sapiens
ccaggttgcaagatttaatga

SEQ ID NO: 87157 - DNA, 23 bp, Homo sapiens
aagaatgttaagacagaccgagt

SEQ ID NO: 87158 - DNA, 17 bp, Homo sapiens
gatgaaaactactcggc

SEQ ID NO: 87159 - DNA, 24 bp, Homo sapiens
tgaaatgtgggtttgttgccatga

SEQ ID NO: 87160 - DNA, 16 bp, Homo sapiens
tttaggtggtggccct

SEQ ID NO: 87161 - DNA, 21 bp, Homo sapiens
ttccacttcgaccgacaaacc

SEQ ID NO: 87162 - DNA, 19 bp, Homo sapiens
acaaatgccctaaaagtgt

SEQ ID NO: 87163 - DNA, 16 bp, Homo sapiens
ttctcagctcagccga

SEQ ID NO: 87164 - DNA, 19 bp, Homo sapiens
cctctgcaacctaaaaaga

SEQ ID NO: 87165 - DNA, 20 bp, Homo sapiens
catctggaacatcccctagg

SEQ ID NO: 87166 - DNA, 21 bp, Homo sapiens
atcccccacatcccaagctag

SEQ ID NO: 87167 - DNA, 24 bp, Homo sapiens
gacagccccaacttcctctgctcc

SEQ ID NO: 87168 - DNA, 24 bp, Homo sapiens
ccagaatccggccccgcccgcctg

SEQ ID NO: 87169 - DNA, 16 bp, Homo sapiens
cagcatggtggaggtg

SEQ ID NO: 87170 - DNA, 24 bp, Homo sapiens
cctccgcctgtcctcccaccaccc

SEQ ID NO: 87171 - DNA, 19 bp, Homo sapiens
gccgctgggcgccccggac

SEQ ID NO: 87172 - DNA, 17 bp, Homo sapiens
cagtgcgtaggcagcac

SEQ ID NO: 87173 - DNA, 20 bp, Homo sapiens
cgagccgccgcttcacgccg

SEQ ID NO: 87174 - DNA, 24 bp, Homo sapiens
gctcgcccgggtggtcggccagca

SEQ ID NO: 87175 - DNA, 24 bp, Homo sapiens
gagctgtttgcagggtcctaactc

SEQ ID NO: 87176 - DNA, 19 bp, Homo sapiens
cggccagggcagcgccggc

SEQ ID NO: 87177 - DNA, 24 bp, Homo sapiens
gaacgtgtatgttggtctcccggg

SEQ ID NO: 87178 - DNA, 23 bp, Homo sapiens
ctgggctcagcgcggtggaaggc

SEQ ID NO: 87179 - DNA, 16 bp, Homo sapiens
taaccacccccgcccc

SEQ ID NO: 87180 - DNA, 20 bp, Homo sapiens
tgcttttaagtatattggaa

SEQ ID NO: 87181 - DNA, 18 bp, Homo sapiens
ttttcctactttctgtta

SEQ ID NO: 87182 - DNA, 26 bp, Homo sapiens
aagttatacatagagatacatagata

SEQ ID NO: 87183 - DNA, 18 bp, Homo sapiens
agaaatgagctagcaaaa

SEQ ID NO: 87184 - DNA, 23 bp, Homo sapiens
tttaaaaatataacttggaattt

SEQ ID NO: 87185 - DNA, 20 bp, Homo sapiens
ttcaagtcatttttgtgtca

SEQ ID NO: 87186 - DNA, 18 bp, Homo sapiens
ccaagtatgcattctgaa

SEQ ID NO: 87187 - DNA, 24 bp, Homo sapiens
tccaatagacttgtaatcatatgc

SEQ ID NO: 87188 - DNA, 17 bp, Homo sapiens
tggcttcagacagcata

SEQ ID NO: 87189 - DNA, 18 bp, Homo sapiens
aggcaccgaggcatctct

SEQ ID NO: 87190 - DNA, 22 bp, Homo sapiens
gtaaaagaaatcattgagtccc

SEQ ID NO: 87191 - DNA, 20 bp, Homo sapiens
aagctgagcaaaagtagata

SEQ ID NO: 87192 - DNA, 17 bp, Homo sapiens
gagatgtagggctagag

SEQ ID NO: 87193 - DNA, 20 bp, Homo sapiens
gaaggaaatgactcaaatat

SEQ ID NO: 87194 - DNA, 18 bp, Homo sapiens
ggctgaggagcccggctg

SEQ ID NO: 87195 - DNA, 24 bp, Homo sapiens
aactcgccgtcgtcctccagctgg

SEQ ID NO: 87196 - DNA, 20 bp, Homo sapiens
gcttcggtttccctcggccc

SEQ ID NO: 87197 - DNA, 23 bp, Homo sapiens
gggccgagcccggggagggcgag

SEQ ID NO: 87198 - DNA, 18 bp, Homo sapiens
ctccggccgcccgcctct

SEQ ID NO: 87199 - DNA, 16 bp, Homo sapiens
cgatgaatggagacgc

SEQ ID NO: 87200 - DNA, 24 bp, Homo sapiens
ttcgggcagaagcccgtgaagttc

SEQ ID NO: 87201 - DNA, 16 bp, Homo sapiens
acgcccactaggccac

SEQ ID NO: 87202 - DNA, 19 bp, Homo sapiens
tcagcagaatgtgttttaa

SEQ ID NO: 87203 - DNA, 21 bp, Homo sapiens
tagtcgcctccagagtgaggg

SEQ ID NO: 87204 - DNA, 16 bp, Homo sapiens
gtctgttgcttgatgc

SEQ ID NO: 87205 - DNA, 22 bp, Homo sapiens
ttttgtttttttaccatgtgac

SEQ ID NO: 87206 - DNA, 20 bp, Homo sapiens
cttataatgagccttcttgc

SEQ ID NO: 87207 - DNA, 17 bp, Homo sapiens
gtggttttgaaacaggt

SEQ ID NO: 87208 - DNA, 20 bp, Homo sapiens
tctctgtacaagagataccc

SEQ ID NO: 87209 - DNA, 20 bp, Homo sapiens
taaggccaaggctgcagtga

SEQ ID NO: 87210 - DNA, 23 bp, Homo sapiens
agagaggaagaaaatagttgcat

SEQ ID NO: 87211 - DNA, 16 bp, Homo sapiens
cttccttgcctggagt

SEQ ID NO: 87212 - DNA, 17 bp, Homo sapiens
gtcacactggtggctag

SEQ ID NO: 87213 - DNA, 20 bp, Homo sapiens
ttgacaccttgcttttccca

SEQ ID NO: 87214 - DNA, 20 bp, Homo sapiens
acagccttgtacttctcatc

SEQ ID NO: 87215 - DNA, 16 bp, Homo sapiens
ctgctgtgtgccaccg

SEQ ID NO: 87216 - DNA, 17 bp, Homo sapiens
gatgccctggccaggaa

SEQ ID NO: 87217 - DNA, 20 bp, Homo sapiens
cacggatacacgactctagc

SEQ ID NO: 87218 - DNA, 18 bp, Homo sapiens
tttaacttcaacccaacc

SEQ ID NO: 87219 - DNA, 17 bp, Homo sapiens
gagattctggatggcaa

SEQ ID NO: 87220 - DNA, 24 bp, Homo sapiens
tagcatctgatgacagcctgggga

SEQ ID NO: 87221 - DNA, 20 bp, Homo sapiens
ttgggcagggtgggtaccca

SEQ ID NO: 87222 - DNA, 23 bp, Homo sapiens
atgggagcctcgagcctgacaga

SEQ ID NO: 87223 - DNA, 16 bp, Homo sapiens
ggttcctgttgatggt

SEQ ID NO: 87224 - DNA, 18 bp, Homo sapiens
caggatcaggctcctata

SEQ ID NO: 87225 - DNA, 17 bp, Homo sapiens
agtgcagcgatgcatcc

SEQ ID NO: 87226 - DNA, 20 bp, Homo sapiens
acagaaggccaagaggaaca

SEQ ID NO: 87227 - DNA, 24 bp, Homo sapiens
gtgtttttctggggaggaaggaac

SEQ ID NO: 87228 - DNA, 22 bp, Homo sapiens
gatgccgtgccatgctccacaa

SEQ ID NO: 87229 - DNA, 22 bp, Homo sapiens
aaacacaacagttcaaaggcga

SEQ ID NO: 87230 - DNA, 22 bp, Homo sapiens
aaccttccccctttggtgtgga

SEQ ID NO: 87231 - DNA, 19 bp, Homo sapiens
aaggtgacagcagacagag

SEQ ID NO: 87232 - DNA, 21 bp, Homo sapiens
gggacccctgctagcctcgtc

SEQ ID NO: 87233 - DNA, 20 bp, Homo sapiens
ccagcacctcgggctgagat

SEQ ID NO: 87234 - DNA, 18 bp, Homo sapiens
cccagatgggtttgcaga

SEQ ID NO: 87235 - DNA, 16 bp, Homo sapiens
gtgaaggcgtctcgca

SEQ ID NO: 87236 - DNA, 22 bp, Homo sapiens
ctagggctccggccccctcgct

SEQ ID NO: 87237 - DNA, 21 bp, Homo sapiens
taacacacaggggttggggcc

SEQ ID NO: 87238 - DNA, 17 bp, Homo sapiens
agctgtgatccatgaga

SEQ ID NO: 87239 - DNA, 24 bp, Homo sapiens
cgtgtcaggtccagaatctgcctg

SEQ ID NO: 87240 - DNA, 23 bp, Homo sapiens
gacatggagatcgatgggcagaa

SEQ ID NO: 87241 - DNA, 19 bp, Homo sapiens
caacagaaccaggactgaa

SEQ ID NO: 87242 - DNA, 16 bp, Homo sapiens
agtttccaggaaggcc

SEQ ID NO: 87243 - DNA, 16 bp, Homo sapiens
cgggttcaaatccaga

SEQ ID NO: 87244 - DNA, 24 bp, Homo sapiens
ggagatgtttggcttcaaagaaga

SEQ ID NO: 87245 - DNA, 24 bp, Homo sapiens
caggatgctgtccgtggggtagga

SEQ ID NO: 87246 - DNA, 24 bp, Homo sapiens
ggtgcaatctcttggcatcccttc

SEQ ID NO: 87247 - DNA, 17 bp, Homo sapiens
tgagaagtcacctacct

SEQ ID NO: 87248 - DNA, 24 bp, Homo sapiens
tgttttcagaaatcctctgtgacg

SEQ ID NO: 87249 - DNA, 17 bp, Homo sapiens
taccctcagtgctccat

SEQ ID NO: 87250 - DNA, 16 bp, Homo sapiens
cagacagcagatcgag

SEQ ID NO: 87251 - DNA, 23 bp, Homo sapiens
agcaaagccaggtgttatgactt

SEQ ID NO: 87252 - DNA, 16 bp, Homo sapiens
cgtcatcatcaaggta

SEQ ID NO: 87253 - DNA, 21 bp, Homo sapiens
ttttggggatggggaactgga

SEQ ID NO: 87254 - DNA, 20 bp, Homo sapiens
tctctgacatgtcccactca

SEQ ID NO: 87255 - DNA, 19 bp, Homo sapiens
gtgggcagggcccacccca

SEQ ID NO: 87256 - DNA, 24 bp, Homo sapiens
gacaaactccccgcccaaccccag

SEQ ID NO: 87257 - DNA, 18 bp, Homo sapiens
caaaagctctaacttgtg

SEQ ID NO: 87258 - DNA, 19 bp, Homo sapiens
gtcttctgatgccagctca

SEQ ID NO: 87259 - DNA, 20 bp, Homo sapiens
tccctggtggaccagtttga

SEQ ID NO: 87260 - DNA, 16 bp, Homo sapiens
cagttttgcagggaga

SEQ ID NO: 87261 - DNA, 20 bp, Homo sapiens
gtttgccctgaagctgtgct

SEQ ID NO: 87262 - DNA, 21 bp, Homo sapiens
ttgtgctgcgaagcgtgagaa

SEQ ID NO: 87263 - DNA, 24 bp, Homo sapiens
catacagcatccggggacagctga

SEQ ID NO: 87264 - DNA, 16 bp, Homo sapiens
gagagatacatagggc

SEQ ID NO: 87265 - DNA, 24 bp, Homo sapiens
ggcgcctccagcagctcccttgag

SEQ ID NO: 87266 - DNA, 16 bp, Homo sapiens
tggtccgcatcgcccg

SEQ ID NO: 87267 - DNA, 17 bp, Homo sapiens
aggagcagggcacagac

SEQ ID NO: 87268 - DNA, 17 bp, Homo sapiens
ctggtcgcggatcttct

SEQ ID NO: 87269 - DNA, 24 bp, Homo sapiens
agctggaaaagtcattcctctcac

SEQ ID NO: 87270 - DNA, 21 bp, Homo sapiens
cctggaaagccaggtgcctgt

SEQ ID NO: 87271 - DNA, 24 bp, Homo sapiens
ggagattgccatccggaacacggg

SEQ ID NO: 87272 - DNA, 21 bp, Homo sapiens
aggtactctgtctcagagacc

SEQ ID NO: 87273 - DNA, 17 bp, Homo sapiens
tgagatggagaagaaga

SEQ ID NO: 87274 - DNA, 20 bp, Homo sapiens
acataccctggcgtttggat

SEQ ID NO: 87275 - DNA, 23 bp, Homo sapiens
caggccggggccgtgttggcaag

SEQ ID NO: 87276 - DNA, 24 bp, Homo sapiens
tgaccctgctgggggcccacatcc

SEQ ID NO: 87277 - DNA, 23 bp, Homo sapiens
aggagaggcggcccaatcttctg

SEQ ID NO: 87278 - DNA, 23 bp, Homo sapiens
tgggaagggcagcgcccaggctg

SEQ ID NO: 87279 - DNA, 23 bp, Homo sapiens
cacccgatcctcaggatggcgct

SEQ ID NO: 87280 - DNA, 23 bp, Homo sapiens
tcttccaggcggatgaggcgtct

SEQ ID NO: 87281 - DNA, 24 bp, Homo sapiens
ctggggctcaacaaatggaatgtg

SEQ ID NO: 87282 - DNA, 23 bp, Homo sapiens
cacacggctcccacggagcatct

SEQ ID NO: 87283 - DNA, 23 bp, Homo sapiens
tcttcctgaccccagagactggg

SEQ ID NO: 87284 - DNA, 24 bp, Homo sapiens
gaagcacaaagcccaggttccatc

SEQ ID NO: 87285 - DNA, 16 bp, Homo sapiens
ccgagggtgccgagac

SEQ ID NO: 87286 - DNA, 24 bp, Homo sapiens
caattattcccataattaaaatac

SEQ ID NO: 87287 - DNA, 21 bp, Homo sapiens
tgaacatttctccattttcct

SEQ ID NO: 87288 - DNA, 19 bp, Homo sapiens
gtgaaagaaggtacatttc

SEQ ID NO: 87289 - DNA, 18 bp, Homo sapiens
ctggaagcatattgagga

SEQ ID NO: 87290 - DNA, 16 bp, Homo sapiens
gggcgctttgtggtct

SEQ ID NO: 87291 - DNA, 21 bp, Homo sapiens
ttgtcaatgatgacaaccagt

SEQ ID NO: 87292 - DNA, 18 bp, Homo sapiens
atgaatccacagctctac

SEQ ID NO: 87293 - DNA, 22 bp, Homo sapiens
attataactgaaacaatgttaa

SEQ ID NO: 87294 - DNA, 17 bp, Homo sapiens
aattccctcacaggatg

SEQ ID NO: 87295 - DNA, 21 bp, Homo sapiens
tcatctttgcttatcagctcc

SEQ ID NO: 87296 - DNA, 17 bp, Homo sapiens
gcatgctagccctgtca

SEQ ID NO: 87297 - DNA, 23 bp, Homo sapiens
aatacctgggctagaacctgggg

SEQ ID NO: 87298 - DNA, 16 bp, Homo sapiens
gagcttcatcaagggg

SEQ ID NO: 87299 - DNA, 23 bp, Homo sapiens
gaaactttctcttcatgtcttca

SEQ ID NO: 87300 - DNA, 22 bp, Homo sapiens
aaaaaaaaaaataaaacaggtt

SEQ ID NO: 87301 - DNA, 16 bp, Homo sapiens
acgacagaagaagcct

SEQ ID NO: 87302 - DNA, 22 bp, Homo sapiens
ctaaaacaattagattaaacac

SEQ ID NO: 87303 - DNA, 18 bp, Homo sapiens
cccaattgttgctttagc

SEQ ID NO: 87304 - DNA, 16 bp, Homo sapiens
aggcagcagggcttcc

SEQ ID NO: 87305 - DNA, 20 bp, Homo sapiens
ctgttaattctggcatactc

SEQ ID NO: 87306 - DNA, 23 bp, Homo sapiens
cacctgaagccacgggtgtctta

SEQ ID NO: 87307 - DNA, 21 bp, Homo sapiens
agggggccctgtctgctgact

SEQ ID NO: 87308 - DNA, 19 bp, Homo sapiens
aacaacttcttgacaaggt

SEQ ID NO: 87309 - DNA, 23 bp, Homo sapiens
atgctcttaataatttccagtgc

SEQ ID NO: 87310 - DNA, 18 bp, Homo sapiens
caccagtggaaaatacaa

SEQ ID NO: 87311 - DNA, 19 bp, Homo sapiens
aattgacaggagaaaacac

SEQ ID NO: 87312 - DNA, 16 bp, Homo sapiens
ttagtgggtatccacc

SEQ ID NO: 87313 - DNA, 18 bp, Homo sapiens
agcataccacaaattctt

SEQ ID NO: 87314 - DNA, 16 bp, Homo sapiens
tctgaatgccactgag

SEQ ID NO: 87315 - DNA, 19 bp, Homo sapiens
cttcaggaatgaagttgta

SEQ ID NO: 87316 - DNA, 20 bp, Homo sapiens
tcactttttgaccattgatt

SEQ ID NO: 87317 - DNA, 24 bp, Homo sapiens
acttgagtcctatgctcagagaaa

SEQ ID NO: 87318 - DNA, 22 bp, Homo sapiens
gatcacttgacccaggaggcag

SEQ ID NO: 87319 - DNA, 16 bp, Homo sapiens
gtttctgttgggactg

SEQ ID NO: 87320 - DNA, 24 bp, Homo sapiens
atgccagcctggacaacagagcaa

SEQ ID NO: 87321 - DNA, 18 bp, Homo sapiens
ggagagacctctctcatg

SEQ ID NO: 87322 - DNA, 20 bp, Homo sapiens
tgcagcaatgaaaatatttc

SEQ ID NO: 87323 - DNA, 22 bp, Homo sapiens
caagttcaacattattcccttt

SEQ ID NO: 87324 - DNA, 18 bp, Homo sapiens
ggttatacccagcagtcc

SEQ ID NO: 87325 - DNA, 16 bp, Homo sapiens
ctacgtgtcttcttgg

SEQ ID NO: 87326 - DNA, 22 bp, Homo sapiens
gggttccacataaggttctcat

SEQ ID NO: 87327 - DNA, 21 bp, Homo sapiens
ttgcaaagacatgaatctgta

SEQ ID NO: 87328 - DNA, 19 bp, Homo sapiens
gaatctggataagagcagt

SEQ ID NO: 87329 - DNA, 17 bp, Homo sapiens
agccagagaatgtttta

SEQ ID NO: 87330 - DNA, 20 bp, Homo sapiens
gattctcatcctttttacgc

SEQ ID NO: 87331 - DNA, 17 bp, Homo sapiens
gtcatgcctgcctttct

SEQ ID NO: 87332 - DNA, 17 bp, Homo sapiens
tctacaggaatagccac

SEQ ID NO: 87333 - DNA, 18 bp, Homo sapiens
tgtgagatgtgtgtgttg

SEQ ID NO: 87334 - DNA, 21 bp, Homo sapiens
gtcctcttcttgagatgacag

SEQ ID NO: 87335 - DNA, 23 bp, Homo sapiens
ccaacagttttctatgattttgg

SEQ ID NO: 87336 - DNA, 18 bp, Homo sapiens
agtgaaaggagtaggaca

SEQ ID NO: 87337 - DNA, 17 bp, Homo sapiens
cctgaaagaagctacct

SEQ ID NO: 87338 - DNA, 18 bp, Homo sapiens
ttctgagttttaatccac

SEQ ID NO: 87339 - DNA, 17 bp, Homo sapiens
gcctttgtgtttcagga

SEQ ID NO: 87340 - DNA, 22 bp, Homo sapiens
ctaaaagaaaggcagctgtcaa

SEQ ID NO: 87341 - DNA, 20 bp, Homo sapiens
tgttttgttgttttattgtc

SEQ ID NO: 87342 - DNA, 16 bp, Homo sapiens
tagagcttgcaggtag

SEQ ID NO: 87343 - DNA, 21 bp, Homo sapiens
agttttaaaaatgagagtcaa

SEQ ID NO: 87344 - DNA, 18 bp, Homo sapiens
acagctctcccccttcca

SEQ ID NO: 87345 - DNA, 22 bp, Homo sapiens
agattaaaaacttttttgatgc

SEQ ID NO: 87346 - DNA, 20 bp, Homo sapiens
ctacatacatacgttgaggc

SEQ ID NO: 87347 - DNA, 19 bp, Homo sapiens
tgggagtttctcactactt

SEQ ID NO: 87348 - DNA, 21 bp, Homo sapiens
tggctttataaagcatttgaa

SEQ ID NO: 87349 - DNA, 16 bp, Homo sapiens
tggcctccctgtccct

SEQ ID NO: 87350 - DNA, 24 bp, Homo sapiens
caattccaaaacaatataataatc

SEQ ID NO: 87351 - DNA, 16 bp, Homo sapiens
tctgtctgccttctcc

SEQ ID NO: 87352 - DNA, 16 bp, Homo sapiens
caccacacctggccaa

SEQ ID NO: 87353 - DNA, 25 bp, Homo sapiens
aaatgtttttttaaatattggcaat

SEQ ID NO: 87354 - DNA, 24 bp, Homo sapiens
ttttgagatagataaatctaagta

SEQ ID NO: 87355 - DNA, 16 bp, Homo sapiens
tagagctgggtttgga

SEQ ID NO: 87356 - DNA, 21 bp, Homo sapiens
tttcaaaatttctatttctgt

SEQ ID NO: 87357 - DNA, 18 bp, Homo sapiens
gcaaaaggaagtttgcta

SEQ ID NO: 87358 - DNA, 17 bp, Homo sapiens
tcatccatctaagcagg

SEQ ID NO: 87359 - DNA, 17 bp, Homo sapiens
gagaggtaaagctggct

SEQ ID NO: 87360 - DNA, 18 bp, Homo sapiens
tgggaagttatgaagacg

SEQ ID NO: 87361 - DNA, 22 bp, Homo sapiens
taattaaaaacattcagacaat

SEQ ID NO: 87362 - DNA, 24 bp, Homo sapiens
gtacttactgcctctcttgctgaa

SEQ ID NO: 87363 - DNA, 22 bp, Homo sapiens
gttatatggaatgtctgtaaat

SEQ ID NO: 87364 - DNA, 23 bp, Homo sapiens
tactttcttacatgttttcctct

SEQ ID NO: 87365 - DNA, 18 bp, Homo sapiens
acattttacactggtgaa

SEQ ID NO: 87366 - DNA, 22 bp, Homo sapiens
tgtgtgaaataacacacaaaaa

SEQ ID NO: 87367 - DNA, 20 bp, Homo sapiens
tgatcagtcagtttatccta

SEQ ID NO: 87368 - DNA, 23 bp, Homo sapiens
tatcaatacataatgagtgttat

SEQ ID NO: 87369 - DNA, 21 bp, Homo sapiens
tgaaacccatttctactcttt

SEQ ID NO: 87370 - DNA, 22 bp, Homo sapiens
agtgaaaaaattaagtgcattt

SEQ ID NO: 87371 - DNA, 22 bp, Homo sapiens
ttcttatattccatatgatgaa

SEQ ID NO: 87372 - DNA, 18 bp, Homo sapiens
attcatctcttaatgcct

SEQ ID NO: 87373 - DNA, 23 bp, Homo sapiens
ttacatacatactaatttcctta

SEQ ID NO: 87374 - DNA, 16 bp, Homo sapiens
tccgcctcagcctccc

SEQ ID NO: 87375 - DNA, 23 bp, Homo sapiens
acttactcatctttactcactta

SEQ ID NO: 87376 - DNA, 17 bp, Homo sapiens
gtggcaatggaaccttt

SEQ ID NO: 87377 - DNA, 23 bp, Homo sapiens
atgagagagtggaaaaaaaaaat

SEQ ID NO: 87378 - DNA, 22 bp, Homo sapiens
tgttctctattttaggaagtgg

SEQ ID NO: 87379 - DNA, 16 bp, Homo sapiens
agtgacagtgcaattt

SEQ ID NO: 87380 - DNA, 23 bp, Homo sapiens
ggtaatttggtcattgtttttag

SEQ ID NO: 87381 - DNA, 21 bp, Homo sapiens
tccctacaagctctgtattta

SEQ ID NO: 87382 - DNA, 17 bp, Homo sapiens
tttcggattttcagggt

SEQ ID NO: 87383 - DNA, 16 bp, Homo sapiens
ttaggacccacttcct

SEQ ID NO: 87384 - DNA, 16 bp, Homo sapiens
ttgctttgatgaacca

SEQ ID NO: 87385 - DNA, 23 bp, Homo sapiens
atagcagagatttatagtgggaa

SEQ ID NO: 87386 - DNA, 21 bp, Homo sapiens
tgcatgcttttatattacaga

SEQ ID NO: 87387 - DNA, 19 bp, Homo sapiens
acatgggtattcattacct

SEQ ID NO: 87388 - DNA, 22 bp, Homo sapiens
attagcatttatgagcaatttt

SEQ ID NO: 87389 - DNA, 20 bp, Homo sapiens
atctgttcttttcagcagtg

SEQ ID NO: 87390 - DNA, 22 bp, Homo sapiens
taaaatcttgataagcagattg

SEQ ID NO: 87391 - DNA, 16 bp, Homo sapiens
gttgtcattcacacat

SEQ ID NO: 87392 - DNA, 24 bp, Homo sapiens
gagaggaggggaggggaggaaagg

SEQ ID NO: 87393 - DNA, 16 bp, Homo sapiens
gggataagaggtgtga

SEQ ID NO: 87394 - DNA, 23 bp, Homo sapiens
aaaggaaagcagaagggaaagga

SEQ ID NO: 87395 - DNA, 20 bp, Homo sapiens
ccaatctgatcttgaactcc

SEQ ID NO: 87396 - DNA, 18 bp, Homo sapiens
aaagggaaagagaaaggg

SEQ ID NO: 87397 - DNA, 16 bp, Homo sapiens
gtggctggcctaactt

SEQ ID NO: 87398 - DNA, 16 bp, Homo sapiens
ttatgggcccttcagg

SEQ ID NO: 87399 - DNA, 22 bp, Homo sapiens
tcaattatttgttcaacgtgcc

SEQ ID NO: 87400 - DNA, 20 bp, Homo sapiens
attcctgaggaccaagaacc

SEQ ID NO: 87401 - DNA, 21 bp, Homo sapiens
aatacaactttctgtaagtgt

SEQ ID NO: 87402 - DNA, 16 bp, Homo sapiens
ctccagctctgggaca

SEQ ID NO: 87403 - DNA, 22 bp, Homo sapiens
aagattggcaaatccatcctga

SEQ ID NO: 87404 - DNA, 22 bp, Homo sapiens
cagtcccagggcatatccagct

SEQ ID NO: 87405 - DNA, 16 bp, Homo sapiens
tcttggtcctcaggtt

SEQ ID NO: 87406 - DNA, 16 bp, Homo sapiens
agcagtgcctgttcac

SEQ ID NO: 87407 - DNA, 16 bp, Homo sapiens
tctaaggagctcagtg

SEQ ID NO: 87408 - DNA, 22 bp, Homo sapiens
gacactttctttttgaggtcgt

SEQ ID NO: 87409 - DNA, 21 bp, Homo sapiens
catcgtgctggtagaggagct

SEQ ID NO: 87410 - DNA, 22 bp, Homo sapiens
taggcccatcatttacttttta

SEQ ID NO: 87411 - DNA, 16 bp, Homo sapiens
aacgctgccatggggc

SEQ ID NO: 87412 - DNA, 16 bp, Homo sapiens
ggagagcatgtttgcc

SEQ ID NO: 87413 - DNA, 24 bp, Homo sapiens
ctcaacatccgactcccgagacat

SEQ ID NO: 87414 - DNA, 23 bp, Homo sapiens
gtcctcgcggcccatgctggccg

SEQ ID NO: 87415 - DNA, 23 bp, Homo sapiens
ttgcttcctcttgagagagctga

SEQ ID NO: 87416 - DNA, 19 bp, Homo sapiens
cagccggccaccatggtgg

SEQ ID NO: 87417 - DNA, 18 bp, Homo sapiens
caattgaactccatctcg

SEQ ID NO: 87418 - DNA, 24 bp, Homo sapiens
cagagtgcaggccgtggggcgcga

SEQ ID NO: 87419 - DNA, 24 bp, Homo sapiens
aaagagaacctctcgagcttccac

SEQ ID NO: 87420 - DNA, 18 bp, Homo sapiens
catcgcttcccgcatgag

SEQ ID NO: 87421 - DNA, 19 bp, Homo sapiens
tagttggcccttccggttc

SEQ ID NO: 87422 - DNA, 16 bp, Homo sapiens
gatcgtcaccatggac

SEQ ID NO: 87423 - DNA, 18 bp, Homo sapiens
acccaaaagtcctatgaa

SEQ ID NO: 87424 - DNA, 23 bp, Homo sapiens
actcatgggtttgtaaaggaagc

SEQ ID NO: 87425 - DNA, 16 bp, Homo sapiens
ccccagagtccggcac

SEQ ID NO: 87426 - DNA, 21 bp, Homo sapiens
tagtgtcatccccacgttttg

SEQ ID NO: 87427 - DNA, 16 bp, Homo sapiens
cattttgagccaggcc

SEQ ID NO: 87428 - DNA, 23 bp, Homo sapiens
taatgatttttgctcacagtgtc

SEQ ID NO: 87429 - DNA, 16 bp, Homo sapiens
ctggaaagctcacgtc

SEQ ID NO: 87430 - DNA, 22 bp, Homo sapiens
gaaggacctctttgatttggtg

SEQ ID NO: 87431 - DNA, 19 bp, Homo sapiens
ccttctctactatacagct

SEQ ID NO: 87432 - DNA, 17 bp, Homo sapiens
acacaatcaaggacaca

SEQ ID NO: 87433 - DNA, 16 bp, Homo sapiens
aaactggtagcatctc

SEQ ID NO: 87434 - DNA, 18 bp, Homo sapiens
aggtgactttgtgaatac

SEQ ID NO: 87435 - DNA, 18 bp, Homo sapiens
ttggccaagaagtgaaag

SEQ ID NO: 87436 - DNA, 24 bp, Homo sapiens
aatttagtgggaaaaaaatttaat

SEQ ID NO: 87437 - DNA, 18 bp, Homo sapiens
aaatgttgtgtgatctcc

SEQ ID NO: 87438 - DNA, 22 bp, Homo sapiens
ggaggaagtgccaatatagtgt

SEQ ID NO: 87439 - DNA, 16 bp, Homo sapiens
tgggcaagttctctca

SEQ ID NO: 87440 - DNA, 22 bp, Homo sapiens
atgatgtttcaaaggaagaacc

SEQ ID NO: 87441 - DNA, 20 bp, Homo sapiens
agaggtagaatatttttgca

SEQ ID NO: 87442 - DNA, 22 bp, Homo sapiens
gaagaggagctggttcaggaga

SEQ ID NO: 87443 - DNA, 16 bp, Homo sapiens
gttctgttctgaagcc

SEQ ID NO: 87444 - DNA, 16 bp, Homo sapiens
agggcagtagatcttt

SEQ ID NO: 87445 - DNA, 22 bp, Homo sapiens
attattaacaggctgctctggc

SEQ ID NO: 87446 - DNA, 19 bp, Homo sapiens
ctttgagcctaccttggcc

SEQ ID NO: 87447 - DNA, 19 bp, Homo sapiens
atcagcctacacacctcac

SEQ ID NO: 87448 - DNA, 23 bp, Homo sapiens
acccaaagaaagagaagatagga

SEQ ID NO: 87449 - DNA, 20 bp, Homo sapiens
aagaagcagattttagatga

SEQ ID NO: 87450 - DNA, 18 bp, Homo sapiens
gtcccataacatctcact

SEQ ID NO: 87451 - DNA, 17 bp, Homo sapiens
cttcttacgccgtccag

SEQ ID NO: 87452 - DNA, 22 bp, Homo sapiens
agctttgtattttcattcaagg

SEQ ID NO: 87453 - DNA, 16 bp, Homo sapiens
gggccaaaaatccccg

SEQ ID NO: 87454 - DNA, 16 bp, Homo sapiens
ttgctccctggagctg

SEQ ID NO: 87455 - DNA, 17 bp, Homo sapiens
ctgctatgtcttcctga

SEQ ID NO: 87456 - DNA, 19 bp, Homo sapiens
tctttagaatctcaatcgc

SEQ ID NO: 87457 - DNA, 17 bp, Homo sapiens
ttgctatgtacttccaa

SEQ ID NO: 87458 - DNA, 17 bp, Homo sapiens
cagtgttcacaagcggg

SEQ ID NO: 87459 - DNA, 21 bp, Homo sapiens
aatattcttaacagagatccc

SEQ ID NO: 87460 - DNA, 23 bp, Homo sapiens
ctcctcccacatttccggagtca

SEQ ID NO: 87461 - DNA, 22 bp, Homo sapiens
cctgggtgtagctttttaaaaa

SEQ ID NO: 87462 - DNA, 17 bp, Homo sapiens
atgggcctcacctggct

SEQ ID NO: 87463 - DNA, 18 bp, Homo sapiens
gcaaacaataccaaattt

SEQ ID NO: 87464 - DNA, 17 bp, Homo sapiens
gcagttctttaaggcaa

SEQ ID NO: 87465 - DNA, 24 bp, Homo sapiens
ggtaggtaataaatctgtatcaga

SEQ ID NO: 87466 - DNA, 17 bp, Homo sapiens
ctctccccttttctttt

SEQ ID NO: 87467 - DNA, 18 bp, Homo sapiens
cgcagagcaccgaggccg

SEQ ID NO: 87468 - DNA, 18 bp, Homo sapiens
aggtcctgagctatcttc

SEQ ID NO: 87469 - DNA, 20 bp, Homo sapiens
ttctggcagcgacgtggctc

SEQ ID NO: 87470 - DNA, 17 bp, Homo sapiens
ctcagagaggtttcaac

SEQ ID NO: 87471 - DNA, 19 bp, Homo sapiens
tctccacccatctcactta

SEQ ID NO: 87472 - DNA, 20 bp, Homo sapiens
tggaatgaagaagtaaccat

SEQ ID NO: 87473 - DNA, 17 bp, Homo sapiens
tgaagctgaaatggaat

SEQ ID NO: 87474 - DNA, 21 bp, Homo sapiens
gacctctctttccttcctctt

SEQ ID NO: 87475 - DNA, 16 bp, Homo sapiens
ggcatccactccaagc

SEQ ID NO: 87476 - DNA, 19 bp, Homo sapiens
ctgttgggacctgctgaaa

SEQ ID NO: 87477 - DNA, 16 bp, Homo sapiens
cgggaaggagatcttg

SEQ ID NO: 87478 - DNA, 18 bp, Homo sapiens
aaattttgagcctcagct

SEQ ID NO: 87479 - DNA, 17 bp, Homo sapiens
cccatctgcagtacaca

SEQ ID NO: 87480 - DNA, 22 bp, Homo sapiens
cagaataaaaagggcacagagc

SEQ ID NO: 87481 - DNA, 23 bp, Homo sapiens
aaggagatgccctggctggggag

SEQ ID NO: 87482 - DNA, 17 bp, Homo sapiens
cagactgacccccaaga

SEQ ID NO: 87483 - DNA, 20 bp, Homo sapiens
gaaaatcaacaaccacaccc

SEQ ID NO: 87484 - DNA, 16 bp, Homo sapiens
tccctgaggtttagtg

SEQ ID NO: 87485 - DNA, 19 bp, Homo sapiens
tgaggagttaaacttgaag

SEQ ID NO: 87486 - DNA, 20 bp, Homo sapiens
catgctggtctgtggccagt

SEQ ID NO: 87487 - DNA, 20 bp, Homo sapiens
gaaaagctaccattatcagt

SEQ ID NO: 87488 - DNA, 17 bp, Homo sapiens
caggctgtcggactgaa

SEQ ID NO: 87489 - DNA, 17 bp, Homo sapiens
acttcacaagatgtcac

SEQ ID NO: 87490 - DNA, 21 bp, Homo sapiens
actggataagaaaattgatgt

SEQ ID NO: 87491 - DNA, 27 bp, Homo sapiens
tgatataatttagttttaactctttaa

SEQ ID NO: 87492 - DNA, 22 bp, Homo sapiens
ccttctcctcataaatagatca

SEQ ID NO: 87493 - DNA, 19 bp, Homo sapiens
tcttcacgtttactgctac

SEQ ID NO: 87494 - DNA, 20 bp, Homo sapiens
tttctagccttctcctccct

SEQ ID NO: 87495 - DNA, 22 bp, Homo sapiens
gtaggcagtgaagtaaatttgt

SEQ ID NO: 87496 - DNA, 16 bp, Homo sapiens
actgaccacacagtga

SEQ ID NO: 87497 - DNA, 23 bp, Homo sapiens
ccagctatgtatcgggaaccatg

SEQ ID NO: 87498 - DNA, 16 bp, Homo sapiens
tatgtccacggccaaa

SEQ ID NO: 87499 - DNA, 19 bp, Homo sapiens
ttcagcagatgaaagccca

SEQ ID NO: 87500 - DNA, 19 bp, Homo sapiens
gatgacatcccaccaggta

SEQ ID NO: 87501 - DNA, 19 bp, Homo sapiens
atctgcttctctcgagcga

SEQ ID NO: 87502 - DNA, 23 bp, Homo sapiens
acctaaaggaaagggaaggaaaa

SEQ ID NO: 87503 - DNA, 19 bp, Homo sapiens
gcttcttctttcatctgca

SEQ ID NO: 87504 - DNA, 18 bp, Homo sapiens
gtggcaccctaggtctcg

SEQ ID NO: 87505 - DNA, 16 bp, Homo sapiens
gcctcctggaacccca

SEQ ID NO: 87506 - DNA, 22 bp, Homo sapiens
atggagcggcagcgcctcgctc

SEQ ID NO: 87507 - DNA, 20 bp, Homo sapiens
ctgctaactcatggttttca

SEQ ID NO: 87508 - DNA, 18 bp, Homo sapiens
gggatgagttggagagga

SEQ ID NO: 87509 - DNA, 20 bp, Homo sapiens
caacacaggtgaaaagaaaa

SEQ ID NO: 87510 - DNA, 16 bp, Homo sapiens
tttcagccaacaggtc

SEQ ID NO: 87511 - DNA, 23 bp, Homo sapiens
cagcagcagggccccaggagtcc

SEQ ID NO: 87512 - DNA, 20 bp, Homo sapiens
atttcctgctcagcctctgc

SEQ ID NO: 87513 - DNA, 16 bp, Homo sapiens
gggagaacagcacatg

SEQ ID NO: 87514 - DNA, 16 bp, Homo sapiens
catcaggcgcttctcc

SEQ ID NO: 87515 - DNA, 24 bp, Homo sapiens
cagatgcggtctgaggagacagct

SEQ ID NO: 87516 - DNA, 16 bp, Homo sapiens
cctctctgactcctca

SEQ ID NO: 87517 - DNA, 22 bp, Homo sapiens
caaaacttctggcccagaaggc

SEQ ID NO: 87518 - DNA, 24 bp, Homo sapiens
cagggcaggctggtctgcggccct

SEQ ID NO: 87519 - DNA, 16 bp, Homo sapiens
cgattcgcacggagga

SEQ ID NO: 87520 - DNA, 23 bp, Homo sapiens
ggagcctccccacggcccagaag

SEQ ID NO: 87521 - DNA, 17 bp, Homo sapiens
actgaagatggctgagg

SEQ ID NO: 87522 - DNA, 16 bp, Homo sapiens
tgcaggtcctgcttca

SEQ ID NO: 87523 - DNA, 17 bp, Homo sapiens
tttgggtgccatcctca

SEQ ID NO: 87524 - DNA, 24 bp, Homo sapiens
tacgtgggcttggtggcaatctcc

SEQ ID NO: 87525 - DNA, 24 bp, Homo sapiens
gggtggtgtcttttcctgctacct

SEQ ID NO: 87526 - DNA, 18 bp, Homo sapiens
agaacatcaccaggacta

SEQ ID NO: 87527 - DNA, 20 bp, Homo sapiens
aaagaggcagatcagctgaa

SEQ ID NO: 87528 - DNA, 16 bp, Homo sapiens
gtttgcctgaatggtc

SEQ ID NO: 87529 - DNA, 16 bp, Homo sapiens
caagcagaagctcctg

SEQ ID NO: 87530 - DNA, 17 bp, Homo sapiens
gagtgaagtggagggat

SEQ ID NO: 87531 - DNA, 17 bp, Homo sapiens
caatgaggttgaagctt

SEQ ID NO: 87532 - DNA, 16 bp, Homo sapiens
cattgcctctgtggct

SEQ ID NO: 87533 - DNA, 16 bp, Homo sapiens
tccatggaaagccgct

SEQ ID NO: 87534 - DNA, 23 bp, Homo sapiens
tgcttgtatgacccaagctccta

SEQ ID NO: 87535 - DNA, 18 bp, Homo sapiens
ctcagtctagttcacagc

SEQ ID NO: 87536 - DNA, 20 bp, Homo sapiens
cgttgcctcctgacatacca

SEQ ID NO: 87537 - DNA, 16 bp, Homo sapiens
aatgacaggctgctgc

SEQ ID NO: 87538 - DNA, 19 bp, Homo sapiens
ttcaaagatactgacatga

SEQ ID NO: 87539 - DNA, 21 bp, Homo sapiens
ttaatttctgattaaggaaat

SEQ ID NO: 87540 - DNA, 19 bp, Homo sapiens
gcccaagctcccatggcct

SEQ ID NO: 87541 - DNA, 18 bp, Homo sapiens
tcttgagttcattgagct

SEQ ID NO: 87542 - DNA, 19 bp, Homo sapiens
aaaccctagatcgcacacc

SEQ ID NO: 87543 - DNA, 21 bp, Homo sapiens
ggagttctcattgtgcagaat

SEQ ID NO: 87544 - DNA, 24 bp, Homo sapiens
cactgtctgcccaagccctgatgc

SEQ ID NO: 87545 - DNA, 17 bp, Homo sapiens
aaagagaccctgggtac

SEQ ID NO: 87546 - DNA, 23 bp, Homo sapiens
aagagcaagcatctgcaggagca

SEQ ID NO: 87547 - DNA, 18 bp, Homo sapiens
aaccagatgccaaccgca

SEQ ID NO: 87548 - DNA, 19 bp, Homo sapiens
gaaagagagggagacagct

SEQ ID NO: 87549 - DNA, 20 bp, Homo sapiens
aatttcctcaactaagtaca

SEQ ID NO: 87550 - DNA, 17 bp, Homo sapiens
gcaagcacaataccatt

SEQ ID NO: 87551 - DNA, 18 bp, Homo sapiens
gggctcaaatgcagatag

SEQ ID NO: 87552 - DNA, 19 bp, Homo sapiens
acaaaatcactcatcacga

SEQ ID NO: 87553 - DNA, 16 bp, Homo sapiens
tatcacagagggcagc

SEQ ID NO: 87554 - DNA, 23 bp, Homo sapiens
tggcattgttgatatcacagggt

SEQ ID NO: 87555 - DNA, 16 bp, Homo sapiens
ctgccctcgtaagggc

SEQ ID NO: 87556 - DNA, 18 bp, Homo sapiens
aaggcagaagacctatct

SEQ ID NO: 87557 - DNA, 17 bp, Homo sapiens
aaagaaggccactcggg

SEQ ID NO: 87558 - DNA, 24 bp, Homo sapiens
ctatttgaacagccttccctttcg

SEQ ID NO: 87559 - DNA, 16 bp, Homo sapiens
ccggtagcaggagaag

SEQ ID NO: 87560 - DNA, 16 bp, Homo sapiens
tgtgtgacagagcgga

SEQ ID NO: 87561 - DNA, 20 bp, Homo sapiens
cacggaaacccccagccagc

SEQ ID NO: 87562 - DNA, 21 bp, Homo sapiens
agctcaccttgcagagcgcca

SEQ ID NO: 87563 - DNA, 17 bp, Homo sapiens
gcaattgcacataagag

SEQ ID NO: 87564 - DNA, 23 bp, Homo sapiens
aaagataccatttgattttcgaa

SEQ ID NO: 87565 - DNA, 16 bp, Homo sapiens
cagcatggccatctcg

SEQ ID NO: 87566 - DNA, 22 bp, Homo sapiens
aggtatacaggataacaaaaaa

SEQ ID NO: 87567 - DNA, 20 bp, Homo sapiens
cgaaggacaacgagataagc

SEQ ID NO: 87568 - DNA, 23 bp, Homo sapiens
gaggaagaccacagggtgctgta

SEQ ID NO: 87569 - DNA, 24 bp, Homo sapiens
gacagaactggcctatgatctgga

SEQ ID NO: 87570 - DNA, 20 bp, Homo sapiens
aagaagaagcacaccaccga

SEQ ID NO: 87571 - DNA, 16 bp, Homo sapiens
tactgaggctatgggt

SEQ ID NO: 87572 - DNA, 23 bp, Homo sapiens
gaatgaacgttcccgaggttgtg

SEQ ID NO: 87573 - DNA, 17 bp, Homo sapiens
gggaatcaaagctgagg

SEQ ID NO: 87574 - DNA, 21 bp, Homo sapiens
actgtttccaggcgcatcatc

SEQ ID NO: 87575 - DNA, 21 bp, Homo sapiens
tggtgatggaatgataaaagt

SEQ ID NO: 87576 - DNA, 21 bp, Homo sapiens
tgatgagattgtgtgttgcag

SEQ ID NO: 87577 - DNA, 19 bp, Homo sapiens
aagggtttgaaagtggaga

SEQ ID NO: 87578 - DNA, 19 bp, Homo sapiens
cctgagcatcaccattttt

SEQ ID NO: 87579 - DNA, 18 bp, Homo sapiens
gctcctgagaaccatgtc

SEQ ID NO: 87580 - DNA, 22 bp, Homo sapiens
gcaaggaagcggagctgattct

SEQ ID NO: 87581 - DNA, 16 bp, Homo sapiens
tgtgcagacccacctg

SEQ ID NO: 87582 - DNA, 17 bp, Homo sapiens
cttcatcatcaccgcag

SEQ ID NO: 87583 - DNA, 19 bp, Homo sapiens
ttttttacagcttctgtgt

SEQ ID NO: 87584 - DNA, 18 bp, Homo sapiens
acctttgggcatagacat

SEQ ID NO: 87585 - DNA, 16 bp, Homo sapiens
ctctctctccccctct

SEQ ID NO: 87586 - DNA, 16 bp, Homo sapiens
acagccaaaaggcagc

SEQ ID NO: 87587 - DNA, 25 bp, Homo sapiens
tctactttttattattattattttt

SEQ ID NO: 87588 - DNA, 18 bp, Homo sapiens
agcttttcctttgtttgg

SEQ ID NO: 87589 - DNA, 20 bp, Homo sapiens
aataatttgactgaccactg

SEQ ID NO: 87590 - DNA, 17 bp, Homo sapiens
caccatgaggtcgtctc

SEQ ID NO: 87591 - DNA, 18 bp, Homo sapiens
tttcattccattccttgc

SEQ ID NO: 87592 - DNA, 22 bp, Homo sapiens
cctcccaaactgctgggattac

SEQ ID NO: 87593 - DNA, 17 bp, Homo sapiens
gtggcggaaaacgacac

SEQ ID NO: 87594 - DNA, 16 bp, Homo sapiens
ggtgcaattaatggag

SEQ ID NO: 87595 - DNA, 20 bp, Homo sapiens
ttgaagtctttcatcagctt

SEQ ID NO: 87596 - DNA, 23 bp, Homo sapiens
attattcctcaaatattgctata

SEQ ID NO: 87597 - DNA, 18 bp, Homo sapiens
actgagtttacttgcctc

SEQ ID NO: 87598 - DNA, 17 bp, Homo sapiens
cattccagcaaagggtg

SEQ ID NO: 87599 - DNA, 22 bp, Homo sapiens
tattgctctaatcagcctggca

SEQ ID NO: 87600 - DNA, 19 bp, Homo sapiens
ggcaaagcactatagaagc

SEQ ID NO: 87601 - DNA, 20 bp, Homo sapiens
aaaaaaactaaactgtggcc

SEQ ID NO: 87602 - DNA, 21 bp, Homo sapiens
accatctttttttaaacattg

SEQ ID NO: 87603 - DNA, 23 bp, Homo sapiens
agaaagtattaaaagttgctcat

SEQ ID NO: 87604 - DNA, 24 bp, Homo sapiens
agaactaaataacatgtatttaag

SEQ ID NO: 87605 - DNA, 17 bp, Homo sapiens
tctcaacaacgccaata

SEQ ID NO: 87606 - DNA, 24 bp, Homo sapiens
caattgttaattgtattgtggaat

SEQ ID NO: 87607 - DNA, 19 bp, Homo sapiens
tctgcacaagtatcatata

SEQ ID NO: 87608 - DNA, 19 bp, Homo sapiens
ggtttcttcatgttctaca

SEQ ID NO: 87609 - DNA, 20 bp, Homo sapiens
aaattgggggaagaaattga

SEQ ID NO: 87610 - DNA, 20 bp, Homo sapiens
tcaggataataagcagatct

SEQ ID NO: 87611 - DNA, 18 bp, Homo sapiens
tctttgtcttacaagctt

SEQ ID NO: 87612 - DNA, 18 bp, Homo sapiens
aagccatcttgggctgca

SEQ ID NO: 87613 - DNA, 20 bp, Homo sapiens
gcacttcaaatatcctatct

SEQ ID NO: 87614 - DNA, 16 bp, Homo sapiens
cagagcccagtaggct

SEQ ID NO: 87615 - DNA, 21 bp, Homo sapiens
tccattcagaaagtaattttc

SEQ ID NO: 87616 - DNA, 20 bp, Homo sapiens
ctctcacccacagcaggact

SEQ ID NO: 87617 - DNA, 16 bp, Homo sapiens
tcctcaggcataggtc

SEQ ID NO: 87618 - DNA, 17 bp, Homo sapiens
agccctatacacaggaa

SEQ ID NO: 87619 - DNA, 21 bp, Homo sapiens
acgtaaaacttatattaaaca

SEQ ID NO: 87620 - DNA, 20 bp, Homo sapiens
tatgctgcctaactctgtga

SEQ ID NO: 87621 - DNA, 20 bp, Homo sapiens
tctcttttcaacaatccatg

SEQ ID NO: 87622 - DNA, 17 bp, Homo sapiens
tgttctcatttctctcc

SEQ ID NO: 87623 - DNA, 17 bp, Homo sapiens
aagaacttgtgaatggc

SEQ ID NO: 87624 - DNA, 18 bp, Homo sapiens
tcctctgacaactgtaga

SEQ ID NO: 87625 - DNA, 16 bp, Homo sapiens
gctgtatggcaggtgt

SEQ ID NO: 87626 - DNA, 24 bp, Homo sapiens
attcttctggacatactggataga

SEQ ID NO: 87627 - DNA, 16 bp, Homo sapiens
ctgccagggactgatg

SEQ ID NO: 87628 - DNA, 21 bp, Homo sapiens
catgtcatagattctgtacat

SEQ ID NO: 87629 - DNA, 19 bp, Homo sapiens
ctgatcacctgaagttcag

SEQ ID NO: 87630 - DNA, 18 bp, Homo sapiens
acttgtcaatctccacca

SEQ ID NO: 87631 - DNA, 17 bp, Homo sapiens
gcaagtcactaggatct

SEQ ID NO: 87632 - DNA, 21 bp, Homo sapiens
cgccacagggtttaaccatca

SEQ ID NO: 87633 - DNA, 17 bp, Homo sapiens
cgtgacctgaaagtatt

SEQ ID NO: 87634 - DNA, 23 bp, Homo sapiens
cattcggccacagtccttactga

SEQ ID NO: 87635 - DNA, 19 bp, Homo sapiens
ctaatgaacccaggcctgc

SEQ ID NO: 87636 - DNA, 23 bp, Homo sapiens
ccaagattcagagcctgaaggaa

SEQ ID NO: 87637 - DNA, 19 bp, Homo sapiens
agatgacatggtcaatgaa

SEQ ID NO: 87638 - DNA, 20 bp, Homo sapiens
aataagcttggggaaattcc

SEQ ID NO: 87639 - DNA, 19 bp, Homo sapiens
gtttgtgggtgaatttttc

SEQ ID NO: 87640 - DNA, 23 bp, Homo sapiens
actcattgatgtccaaggctgaa

SEQ ID NO: 87641 - DNA, 19 bp, Homo sapiens
agaactacaccaatgccat

SEQ ID NO: 87642 - DNA, 21 bp, Homo sapiens
tggaaacaggctgtcaaacaa

SEQ ID NO: 87643 - DNA, 23 bp, Homo sapiens
tttgtgtctcttttttttttttt

SEQ ID NO: 87644 - DNA, 20 bp, Homo sapiens
agagagacacatctgtgaaa

SEQ ID NO: 87645 - DNA, 20 bp, Homo sapiens
cacagcaatagagaagtctc

SEQ ID NO: 87646 - DNA, 23 bp, Homo sapiens
ttgggtagttgttcttgaacatg

SEQ ID NO: 87647 - DNA, 19 bp, Homo sapiens
gcaatgccagaaatgaatg

SEQ ID NO: 87648 - DNA, 22 bp, Homo sapiens
aaatgtgtttttttaaaccaga

SEQ ID NO: 87649 - DNA, 17 bp, Homo sapiens
tgcaagtatggagctca

SEQ ID NO: 87650 - DNA, 20 bp, Homo sapiens
aatgctggaatggtaattta

SEQ ID NO: 87651 - DNA, 21 bp, Homo sapiens
gctcaagaaagatggaagaaa

SEQ ID NO: 87652 - DNA, 23 bp, Homo sapiens
taatgatgccactaagcagcaca

SEQ ID NO: 87653 - DNA, 18 bp, Homo sapiens
accttgtttgtttcagga

SEQ ID NO: 87654 - DNA, 22 bp, Homo sapiens
ataattaagaacttgagctcca

SEQ ID NO: 87655 - DNA, 16 bp, Homo sapiens
tgggggtggtgtgggt

SEQ ID NO: 87656 - DNA, 20 bp, Homo sapiens
aatcgtgctgttagttggta

SEQ ID NO: 87657 - DNA, 22 bp, Homo sapiens
ttttactgtatctcaaaagaaa

SEQ ID NO: 87658 - DNA, 18 bp, Homo sapiens
atacttgcaaatctgatc

SEQ ID NO: 87659 - DNA, 22 bp, Homo sapiens
tctctccctccctcagtagacc

SEQ ID NO: 87660 - DNA, 21 bp, Homo sapiens
cagagactgcagcccggactc

SEQ ID NO: 87661 - DNA, 20 bp, Homo sapiens
cagctgcagggcgcacgact

SEQ ID NO: 87662 - DNA, 24 bp, Homo sapiens
ccgggacaggcgcagcccccgccg

SEQ ID NO: 87663 - DNA, 21 bp, Homo sapiens
cacgcgcgccttgctccccgc

SEQ ID NO: 87664 - DNA, 22 bp, Homo sapiens
gggaccgtgcgcaccgcgtgct

SEQ ID NO: 87665 - DNA, 22 bp, Homo sapiens
gggagtttctggcacccacttg

SEQ ID NO: 87666 - DNA, 16 bp, Homo sapiens
tccggctgccactctc

SEQ ID NO: 87667 - DNA, 24 bp, Homo sapiens
cttggtgacaggtggcgtccggcg

SEQ ID NO: 87668 - DNA, 24 bp, Homo sapiens
cggctgggtagcagcacgtctctt

SEQ ID NO: 87669 - DNA, 18 bp, Homo sapiens
agcagcatcgccaccacc

SEQ ID NO: 87670 - DNA, 16 bp, Homo sapiens
tcccgccctcgcccag
